(19) United States
(12) Patent Application Publication
(10) Pub. No.: US 2022/0106403 A1
(43) Pub. Date: Apr. 7, 2022

(54) HETERODIMERIC ANTIBODIES THAT BIND MSLN AND CD3

(71) Applicant: Xencor, Inc., Monrovia, CA (US)

(72) Inventors: John R. Desjarlais, Pasadena, CA (US); Matthew Bernett, Monrovia, CA (US); Michael Hedvat, Encino, CA (US); Veronica Gusti Zeng, Monrovia, CA (US); Matthew S. Faber, Monrovia, CA (US)

(21) Appl. No.: 17/321,272

(22) Filed: May 14, 2021

Related U.S. Application Data
(60) Provisional application No. 63/025,021, filed on May 14, 2020.

(51) Int. Cl. C07K 16/30; C07K 16/28; A61K 39/00

(52) U.S. Cl. CPC C07K 16/3069; C07K 16/2809; A61K 39/00; C07K 2317/565; C07K 2317/56; C07K 2317/622; C07K 2317/31

(57) ABSTRACT

The present invention is directed to antibodies, including novel antigen binding domains and heterodimeric antibodies, that bind Mesothelin (MSLN).

### PRIORITY

[0001] This application claims priority to U.S. Provisional Patent Application No. 63/025,021, filed May 14, 2020, which is hereby incorporated by reference in its entirety.

### SEQUENCE LISTING INCORPORATION PARAGRAPH

[0002] The instant application contains a Sequence Listing which has been submitted electronically in ASCII format and is hereby incorporated by reference in its entirety. Said ASCII copy, created on Jul. 22, 2021, is named 067461-5268-US_SL.txt and is 1,650,121 bytes in size.

### BACKGROUND

[0003] Antibody-based therapeutics have been used successfully to treat a variety of diseases, including cancer. An increasingly prevalent avenue being explored is the engineering of single immunoglobulin molecules that co-engage two different antigens. Such alternate antibody formats that engage two different antigens are often referred to as bispecific antibodies. Because the considerable diversity of the antibody variable region (Fv) makes it possible to produce an Fv that recognizes virtually any molecule, the typical approach to bispecific antibody generation is the introduction of new variable regions into the antibody.

[0004] A particularly useful approach for bispecific antibodies is to engineer a first binding domain which engages CD3 and a second binding domain which engages an antigen associated with or upregulated on cancer cells so that the bispecific antibody redirects CD3⁺ T cells to destroy the cancer cells. Mesothelin (MSLN) has previously been reported to be highly expressed in ovarian tumors. Current treatment options for ovarian cancer have only modest efficacy and there remains a large unmet need for new targeted therapies. The present invention provides novel bispecific antibodies to CD3 and MSLN that are capable of localizing CD3⁺ effector T cells to MSLN expressing tumors such as in ovarian cancer.

### BRIEF SUMMARY

[0005] Accordingly, provided herein are MSLN antigen binding domains and anti-MSLN antibodies (e.g., bispecific antibodies).

[0006] In one aspect, provided herein is a composition that includes a Mesothelin (MSLN) binding domain that includes the variable heavy complementary determining regions 1-3 (vhCDR1-3) and the variable light complementary determining regions (vlCDR1-3) of any of the following MSLN binding domains: MESO-A[MSLN]_H1.1_L1, MESO-B[MSLN]_H0L0, MESO-C[MSLN]_H1L1, MESO-C[MSLN]_H1.1_L1, MESO-C[MSLN]_H1.2L1, MESO-C[MSLN]_H1.3_L1, MESO-C[MSLN]_H1.4_L1, MESO-C[MSLN]_H1.5_L1, MESO-C[MSLN]_H1.6_L1, MESO-C[MSLN]_H1.7_L1, MESO-C[MSLN]_H1.8_L1, MESO-C[MSLN]_H1.9_L1, MESO-C[MSLN]_H1_L1.1, MESO-C[MSLN]_H1_L1.2, MESO-C[MSLN]_H1_L1.3, MESO-C[MSLN]_H1_L1.4, MESO-C[MSLN]_H1_L1.5, MESO-C[MSLN]_H1_L1.6, MESO-C[MSLN]_H1_L1.7, MESO-C[MSLN]_H1_L1.8, MESO-C[MSLN]_H1_L1.9, MESO-C[MSLN]_H1_L1.10, MESO-C[MSLN]_H1.5_L1.3, MESO-C[MSLN]_H1.6_L1.3, MESO-C[MSLN]_H1.12_L1.9, MESO-C[MSLN]_H1.13_L1.9, MESO-C[MSLN]_H1.3_L1.13, MESO-C[MSLN]_H1.3_L1.14, MESO-C[MSLN]_H1.3_L1.15, MESO-C[MSLN]_H1.3_L1.16, MESO-C[MSLN]_H1.3_L1.17, MESO-C[MSLN]_H1.3_L1.18, MESO-C[MSLN]_H1.3_L1.9, MESO-C[MSLN]_H1.3_L1.5, MESO-C[MSLN]_H1_L1.20, MESO-C[MSLN]_H1.12_L1.20,_MESO-C[MSLN]_H1.14_L1.14, MESO-C[MSLN]_H1.15_L1.14, MESO-C[MSLN]_H1.16_L1.14, MESO-C[MSLN]_H1_L1.19, MESO-C[MSLN]_H1_L1.21, MESO-C[MSLN]_H1_L1.22, MESO-C[MSLN]_H1.12_L1.19, MESO-C[MSLN]_H1.12_L1.21, MESO-C[MSLN]_H1.12_L1.22, and MESO-C[MSLN]_H1.12_L1.9 (FIGS. 15-21).

[0007] In another aspect, provided herein is a composition that includes a Mesothelin (MSLN) binding domain that includes a variable heavy domain and a variable light domain of any of the following MSLN binding domains: MESO-A[MSLN]_H1.1_L1, MESO-B[MSLN]_H0L0, MESO-C[MSLN]_H1L1, MESO-C[MSLN]_H1.1_L1, MESO-C[MSLN]_H1.2L1, MESO-C[MSLN]_H1.3_L1, MESO-C[MSLN]_H1.4_L1, MESO-C[MSLN]_H1.5_L1, MESO-C[MSLN]_H1.6_L1, MESO-C[MSLN]_H1.7_L1, MESO-C[MSLN]_H1.8_L1, MESO-C[MSLN]_H1.9_L1, MESO-C[MSLN]_H1_L1.1, MESO-C[MSLN]_H1_L1.2, MESO-C[MSLN]_H1_L1.3, MESO-C[MSLN]_H1_L1.4, MESO-C[MSLN]_H1_L1.5, MESO-C[MSLN]_H1_L1.6, MESO-C[MSLN]_H1_L1.7, MESO-C[MSLN]_H1_L1.8, MESO-C[MSLN]_H1_L1.9, MESO-C[MSLN]_H1_L1.10, MESO-C[MSLN]_H1.5_L1.3, MESO-C[MSLN]_H1.6_L1.3, MESO-C[MSLN]_H1.12_L1.9, MESO-C[MSLN]_H1.13_L1.9, MESO-C[MSLN]_H1.3_L1.13, MESO-C[MSLN]_H1.3_L1.14, MESO-C[MSLN]_H1.3_L1.15, MESO-C[MSLN]_H1.3_L1.16, MESO-C[MSLN]_H1.3_L1.17, MESO-C[MSLN]_H1.3_L1.18, MESO-C[MSLN]_H1.3_L1.9, MESO-C[MSLN]_H1.3_L1.5, MESO-C[MSLN]_H1_L1.20, MESO-C[MSLN]_H1.12_L1.20, MESO-C[MSLN]_H1.14_L1.14, MESO-C[MSLN]_H1.15_L1.14, MESO-C[MSLN]_H1.16_L1.14, MESO-C[MSLN]_H1_L1.19, MESO-C[MSLN]_H1_L1.21, MESO-C[MSLN]_H1_L1.22, MESO-C[MSLN]_H1.12_L1.19, MESO-C[MSLN]_H1.12_L1.21, MESO-C[MSLN]_H1.12_L1.22, and MESO-C[MSLN]_H1.12_L1.9 (FIGS. 15-21).

[0008] In another aspect, the present invention provides a composition that includes a Mesothelin (MSLN) binding domain selected from the following MSLN binding domains: MESO-A[MSLN]_H1.1_L1, MESO-B[MSLN]_H0L0, MESO-C[MSLN]_H1L1, MESO-C[MSLN]_H1.1_L1, MESO-C[MSLN]_H1.2L1, MESO-C[MSLN]_H1.3_L1, MESO-C[MSLN]_H1.4_L1, MESO-C[MSLN]_H1.5_L1, MESO-C[MSLN]_H1.6_L1, MESO-C[MSLN]_H1.7_L1, MESO-C[MSLN]_H1.8_L1, MESO-C[MSLN]_H1.9_L1, MESO-C[MSLN]_H1_L1.1, MESO-C[MSLN]_H1_L1.2, MESO-C[MSLN]_H1_L1.3, MESO-C[MSLN]_H1_L1.4, MESO-C[MSLN]_H1_L1.5, MESO-C[MSLN]_H1_L1.6, MESO-C[MSLN]_H1_L1.7, MESO-C[MSLN]_H1_L1.8, MESO-C[MSLN]_H1_L1.9, MESO-C[MSLN]_H1_L1.10, MESO-C[MSLN]_H1.5_L1.3, MESO-C[MSLN]_H1.6_L1.3, MESO-C[MSLN]_H1.12_L1.9, MESO-C[MSLN]_H1.13_L1.9, MESO-C[MSLN]_H1.3_L1.13, MESO-C[MSLN]_H1.3_L1.14, MESO-C[MSLN]_H1.3_L1.15, MESO-C[MSLN]_H1.3_L1.16, MESO-C[MSLN]_H1.3_L1.17, MESO-C[MSLN]_H1.3_L1.18, MESO-C[MSLN]_H1.3_L1.9, MESO-C[MSLN]_H1.3_L1.5, MESO-C[MSLN]_H1_L1.20, MESO-C[MSLN]_H1.12_L1.20,MESO-C[MSLN]_H1.14_L1.14, MESO-C[MSLN]_H1.15_L1.14, MESO-C[MSLN]_H1.16_L1.14, MESO-C[MSLN]_H1_L1.19, MESO-C[MSLN]_H1_L1.21, MESO-C[MSLN]_H1_L1.22, MESO-C[MSLN]_H1.12_L1.19, MESO-C[MSLN]_H1.12_L1.21, MESO-C[MSLN]_H1.12_L1.22, and MESO-C[MSLN]_H1.12_L1.9 (FIGS. 15-21).

[0009] In another aspect, the present invention provides a nucleic acid composition that includes: a) a first nucleic acid encoding a variable heavy domain that includes the variable heavy complementary determining regions 1-3 (vhCDR1-3) of a MSLN binding domain; and b) a second nucleic acid encoding a variable light domain that includes the variable light complementary determining regions 1-3 (vlCDR1-3) of the MSLN binding domain, wherein the MSLN binding domain is one of the following MSLN binding domains: MESO-A[MSLN]_H1.1_L1, MESO-B[MSLN]_H0L0, MESO-C[MSLN]_H1L1, MESO-C[MSLN]_H1.1_L1, MESO-C[MSLN]_H1.2L1, MESO-C[MSLN]_H1.3_L1, MESO-C[MSLN]_H1.4_L1, MESO-C[MSLN]_H1.5_L1, MESO-C[MSLN]_H1.6_L1, MESO-C[MSLN]_H1.7_L1, MESO-C[MSLN]_H1.8_L1, MESO-C[MSLN]_H1.9_L1, MESO-C[MSLN]_H1_L1.1, MESO-C[MSLN]_H1_L1.2, MESO-C[MSLN]_H1_L1.3, MESO-C[MSLN]_H1_L1.4, MESO-C[MSLN]_H1_L1.5, MESO-C[MSLN]_H1_L1.6, MESO-C[MSLN]_H1_L1.7, MESO-C[MSLN]_H1_L1.8, MESO-C[MSLN]_H1_L1.9, MESO-C[MSLN]_H1_L1.10, MESO-C[MSLN]_H1.5_L1.3, MESO-C[MSLN]_H1.6_L1.3, MESO-C[MSLN]_H1.12_L1.9, MESO-C[MSLN]_H1.13_L1.9, MESO-C[MSLN]_H1.3_L1.13, MESO-C[MSLN]_H1.3_L1.14, MESO-C[MSLN]_H1.3_L1.15, MESO-C[MSLN]_H1.3_L1.16, MESO-C[MSLN]_H1.3_L1.17, MESO-C[MSLN]_H1.3_L1.18, MESO-C[MSLN]_H1.3_L1.9, MESO-C[MSLN]_H1.3_L1.5, MESO-C[MSLN]_H1_L1.20, MESO-C[MSLN]_H1.12_L1.20,MESO-C[MSLN]_H1.14_L1.14, MESO-C[MSLN]_H1.15_L1.14, MESO-C[MSLN]_H1.16_L1.14, MESO-C[MSLN]_H1_L1.19, MESO-C[MSLN]_H1_L1.21, MESO-C[MSLN]_H1_L1.22, MESO-C[MSLN]_H1.12_L1.19, MESO-C[MSLN]_H1.12_L1.21, MESO-C[MSLN]_H1.12_L1.22, and MESO-C[MSLN]_H1.12_L1.9 (FIGS. 15-21).

[0010] In another aspect, the present invention provides a nucleic acid composition that includes: a) a first nucleic acid encoding a variable heavy domain that includes the variable heavy domain of a MSLN binding domain; and b) a second nucleic acid encoding a variable light domain that includes the variable light domain of the MSLN binding domain, wherein the MSLN binding domain is any one of the following MSLN binding domains: MESO-A[MSLN]_H1.1_L1, MESO-B[MSLN]_H0L0, MESO-C[MSLN]_H1L1, MESO-C[MSLN]_H1.1_L1, MESO-C[MSLN]_H1.2L1, MESO-C[MSLN]_H1.3_L1, MESO-C[MSLN]_H1.4_L1, MESO-C[MSLN]_H1.5_L1, MESO-C[MSLN]_H1.6_L1, MESO-C[MSLN]_H1.7_L1, MESO-C[MSLN]_H1.8_L1, MESO-C[MSLN]_H1.9_L1, MESO-C[MSLN]_H1_L1.1, MESO-C[MSLN]_H1_L1.2, MESO-C[MSLN]_H1_L1.3, MESO-C[MSLN]_H1_L1.4, MESO-C[MSLN]_H1_L1.5, MESO-C[MSLN]_H1_L1.6, MESO-C[MSLN]_H1_L1.7, MESO-C[MSLN]_H1_L1.8, MESO-C[MSLN]_H1_L1.9, MESO-C[MSLN]_H1_L1.10, MESO-C[MSLN]_H1.5_L1.3, MESO-C[MSLN]_H1.6_L1.3, MESO-C[MSLN]_H1.12_L1.9, MESO-C[MSLN]_H1.13_L1.9, MESO-C[MSLN]_H1.3_L1.13, MESO-C[MSLN]_H1.3_L1.14, MESO-C[MSLN]_H1.3_L1.15, MESO-C[MSLN]_H1.3_L1.16, MESO-C[MSLN]_H1.3_L1.17, MESO-C[MSLN]_H1.3_L1.18, MESO-C[MSLN]_H1.3_L1.9, MESO-C[MSLN]_H1.3_L1.5, MESO-C[MSLN]_H1_L1.20, MESO-C[MSLN]_H1.12_L1.20,MESO-C[MSLN]_H1.14_L1.14, MESO-C[MSLN]_H1.15_L1.14, MESO-C[MSLN]_H1.16_L1.14, MESO-C[MSLN]_H1_L1.19, MESO-C[MSLN]_H1_L1.21, MESO-C[MSLN]_H1_L1.22, MESO-C[MSLN]_H1.12_L1.19, MESO-C[MSLN]_H1.12_L1.21, MESO-C[MSLN]_H1.12_L1.22, and MESO-C[MSLN]_H1.12_L1.9 (FIGS. 15-21).

[0011] In some embodiments, the present invention provides an expression vector composition that includes: a) a first expression vector that includes the first nucleic acid b) a second expression vector that includes a second nucleic acid. In further embodiments, the present invention provides a host cell that includes the expression vector composition.

[0012] In some embodiments, the present invention provides a method of making a Mesothelin (MSLN) binding domain that includes culturing the host cell under conditions wherein the MSLN binding domain is expressed, and recovering the MSLN binding domain.

[0013] In another aspect, the present invention provides an anti-MSLN antibody that includes an Mesothelin (MSLN) binding domain, the MSLN binding domain includes the variable heavy complementary determining regions 1-3 (vhCDR1-3) and the variable light complementary determining regions (vlCDR1-3) of any of the following MSLN binding domains: MESO-A[MSLN]_H1.1_L1, MESO-B[MSLN]_H0L0, MESO-C[MSLN]_H1L1, MESO-C[MSLN]_H1.1_L1, MESO-C[MSLN]_H1.2L1, MESO-C[MSLN]_H1.3_L1, MESO-C[MSLN]_H1.4_L1, MESO-C[MSLN]_H1.5_L1, MESO-C[MSLN]_H1.6_L1, MESO-C[MSLN]_H1.7_L1, MESO-C[MSLN]_H1.8_L1, MESO-C[MSLN]_H1.9_L1, MESO-C[MSLN]_H1_L1.1, MESO-C[MSLN]_H1_L1.2, MESO-C[MSLN]_H1_L1.3, MESO-C[MSLN]_H1_L1.4, MESO-C[MSLN]_H1_L1.5, MESO-C[MSLN]_H1_L1.6, MESO-C[MSLN]_H1_L1.7, MESO-C[MSLN]_H1_L1.8, MESO-C[MSLN]_H1_L1.9, MESO-C[MSLN]_H1_L1.10, MESO-C[MSLN]_H1.5_L1.3, MESO-C[MSLN]_H1.6_L1.3, MESO-C[MSLN]_H1.12_L1.9, MESO-C[MSLN]_H1.13_L1.9, MESO-C[MSLN]_H1.3_L1.13, MESO-C[MSLN]_H1.3_L1.14, MESO-C[MSLN]_H1.3_L1.15, MESO-C[MSLN]_H1.3_L1.16, MESO-C[MSLN]_H1.3_L1.17, MESO-C[MSLN]_H1.3_L1.18, MESO-C[MSLN]_H1.3_L1.9, MESO-C[MSLN]_H1.3_L1.5, MESO-C[MSLN]_H1_L1.20, MESO-C[MSLN]_H1.12_L1.20, MESO-C[MSLN]_H1.14_L1.14, MESO-C[MSLN]_H1.15_L1.14, MESO-C[MSLN]_H1.16_L1.14, MESO-C[MSLN]_H1_L1.19, MESO-C[MSLN]_H1_L1.21, MESO-C[MSLN]_H1_L1.22, MESO-C[MSLN]_H1.12_L1.19, MESO-C[MSLN]_H1.12_L1.21, MESO-C[MSLN]_H1.12_L1.22, and MESO-C[MSLN]_H1.12_L1.9 (FIGS. 15-21).

[0014] In some embodiments, the vhCDR1-3 and vlCDR1-3 are selected from the vhCDR1-3 and vlCDR1-3 of any of the following MSLN binding domains in FIGS. 15-21.

[0015] In another aspect, the present invention provides an anti-MSLN antibody that includes an Mesothelin (MSLN) binding domain, the MSLN binding domain includes a variable heavy domain and a variable light domain of any of the following MSLN binding domains: MESO-A[MSLN]_H1.1_L1, MESO-B[MSLN]_H0L0, MESO-C[MSLN]_H1L1, MESO-C[MSLN]_H1.1_L1, MESO-C[MSLN]_H1.2L1, MESO-C[MSLN]_H1.3_L1, MESO-C[MSLN]_H1.4_L1, MESO-C[MSLN]_H1.5_L1, MESO-C[MSLN]_H1.6_L1, MESO-C[MSLN]_H1.7_L1, MESO-C[MSLN]_H1.8_L1, MESO-C[MSLN]_H1.9_L1, MESO-C[MSLN]_H1_L1.1, MESO-C[MSLN]_H1_L1.2, MESO-C[MSLN]_H1_L1.3, MESO-C[MSLN]_H1_L1.4, MESO-C[MSLN]_H1_L1.5, MESO-C[MSLN]_H1_L1.6, MESO-C[MSLN]_H1_L1.7, MESO-C[MSLN]_H1_L1.8, MESO-C[MSLN]_H1_L1.9, MESO-C[MSLN]_H1_L1.10, MESO-C[MSLN]_H1.5_L1.3, MESO-C[MSLN]_H1.6_L1.3, MESO-C[MSLN]_H1.12_L1.9, MESO-C[MSLN]_H1.13_L1.9, MESO-C[MSLN]_H1.3_L1.13, MESO-C[MSLN]_H1.3_L1.14, MESO-C[MSLN]_H1.3_L1.15, MESO-C[MSLN]_H1.3_L1.16, MESO-C[MSLN]_H1.3_L1.17, MESO-C[MSLN]_H1.3_L1.18, MESO-C[MSLN]_H1.3_L1.9, MESO-C[MSLN]_H1.3_L1.5, MESO-C[MSLN]_H1_L1.20, MESO-C[MSLN]_H1.12_L1.20,MESO-C[MSLN]_H1.14_L1.14, MESO-C[MSLN]_H1.15_L1.14, MESO-C[MSLN]_H1.16_L1.14, MESO-C[MSLN]_H1_L1.19, MESO-C[MSLN]_H1_L1.21, MESO-C[MSLN]_H1_L1.22, MESO-C[MSLN]_H1.12_L1.19, MESO-C[MSLN]_H1.12_L1.21, MESO-C[MSLN]_H1.12_L1.22, and MESO-C[MSLN]_H1.12_L1.9 (FIGS. 15-21).

[0016] In another aspect, provided herein is an anti-MSLN antibody that includes an Mesothelin (MSLN) binding domain selected from any one of the following MSLN binding domains: MESO-A[MSLN]_H1.1_L1, MESO-B[MSLN]_H0L0, MESO-C[MSLN]_H1L1, MESO-C[MSLN]_H1.1_L1, MESO-C[MSLN]_H1.2L1, MESO-C[MSLN]_H1.3_L1, MESO-C[MSLN]_H1.4_L1, MESO-C[MSLN]_H1.5_L1, MESO-C[MSLN]_H1.6_L1, MESO-C[MSLN]_H1.7_L1, MESO-C[MSLN]_H1.8_L1, MESO-C[MSLN]_H1.9_L1, MESO-C[MSLN]_H1_L1.1, MESO-C[MSLN]_H1_L1.2, MESO-C[MSLN]_H1_L1.3, MESO-C[MSLN]_H1_L1.4, MESO-C[MSLN]_H1_L1.5, MESO-C[MSLN]_H1_L1.6, MESO-C[MSLN]_H1_L1.7, MESO-C[MSLN]_H1_L1.8, MESO-C[MSLN]_H1_L1.9, MESO-C[MSLN]_H1_L1.10, MESO-C[MSLN]_H1.5_L1.3, MESO-C[MSLN]_H1.6_L1.3, MESO-C[MSLN]_H1.12_L1.9, MESO-C[MSLN]_H1.13_L1.9, MESO-C[MSLN]_H1.3_L1.13, MESO-C[MSLN]_H1.3_L1.14, MESO-C[MSLN]_H1.3_L1.15, MESO-C[MSLN]_H1.3_L1.16, MESO-C[MSLN]_H1.3_L1.17, MESO-C[MSLN]_H1.3_L1.18, MESO-C[MSLN]_H1.3_L1.9, MESO-C[MSLN]_H1.3_L1.5, MESO-C[MSLN]_H1_L1.20, MESO-C[MSLN]_H1.12_L1.20,MESO-C[MSLN]_H1.14_L1.14, MESO-C[MSLN]_H1.15_L1.14, MESO-C[MSLN]_H1.16_L1.14, MESO-C[MSLN]_H1_L1.19, MESO-C[MSLN]_H1_L1.21, MESO-C[MSLN]_H1_L1.22, MESO-C[MSLN]_H1.12_L1.19, MESO-C[MSLN]_H1.12_L1.21, MESO-C[MSLN]_H1.12_L1.22, and MESO-C[MSLN]_H1.12_L1.9 (FIGS. 15-21). In some embodiments, the antibody includes: a) a first monomer that includes a first antigen binding domain and a first constant domain; and b) a second monomer that includes a second antigen binding domain and a second constant domain, wherein either of the first antigen binding domain or second antigen binding domain is the MSLN binding domain. In further embodiments, first antigen binding domain and the second antigen binding domain bind different antigens. In further embodiments, the first antigen binding domain is the MSLN binding domain and the second antigen binding domain is a CD3 binding domain. In further embodiments, the CD3 binding domain includes the vhCDR1-3, and vlCDR1-3 of any of the following CD3 binding domains: H1.30_L1.47, H1.32_L1.47, H1.89_L1.47, H1.90_L1.47, H1.33_L1.47, H1.31_L1.47, L1.47_H1.30, L1.47_H1.30, L1.47_H1.32, L1.47_H1.89, L1.47_H1.90, L1.47_H1.33, and L1.47_H1.31 (FIGS. 10A-10F). In further embodiments, the vhCDR1-3 and vlCDR1-3 of the CD3 binding domain are selected from the vhCDR1-3 and vlCDR1-3 in FIGS. 10A-10F.

[0017] In some embodiments, the CD3 binding domain includes the variable heavy domain and variable light domain of any of the following CD3 binding domains: H1.30_L1.47, H1.32_L1.47, H1.89_L1.47, H1.90_L1.47, H1.33_L1.47, H1.31_L1.47, L1.47_H1.30, L1.47_H1.30, L1.47_H1.32, L1.47_H1.89, L1.47_H1.90, L1.47_H1.33, and L1.47_H1.31 (FIGS. 10A-10F).

[0018] In some embodiments, the CD3 binding domain is an anti-CD3 scFv.

[0019] In some embodiments, wherein the first and second constant domains each includes CH2-CH3.

[0020] In some embodiments, the first and second constant domains each includes CH1-hinge-CH2-CH3.

[0021] In some embodiments, the first and second constant domains each are a variant constant domain.

[0022] In some embodiments, the first and second monomers include a set of heterodimerization variants are any one of the variants depicted in FIGS. 1A-1E. In some embodiments, the set of heterodimerization variants includes one of the follow set of variants: S364K/E357Q:L368D/K370S; S364K:L368D/K370S; S364K:L368E/K370S; D401K:T411E/K360E/Q362E; and T366W:T366S/L368A/Y407V.

[0023] In some embodiments, the first and second monomers each further include an ablation variant. In further embodiments, the ablation variant is E233P/L234V/L235A/G236del/S267K.

[0024] In some embodiments, the at least one of the first or second monomer further includes a pI variant. In further embodiments, the pI variant is N208D/Q295E/N384D/Q418E/N421D. In some embodiments, the scFv includes a charged scFv linker.

[0025] In some embodiments, the present invention provides a nucleic acid composition including nucleic acids encoding the anti-MSLN. In some embodiments, the composition including nucleic acids encoding first and second monomers. In some embodiments, the present invention provides expression vectors that include the nucleic acids. In some embodiments, the present invention provides a host cell transformed with the expression vector.

[0026] In some embodiments, the present invention provides a method of making an anti-MSLN antibody according to any one of claims B1 to B21. The method includes culturing the host cell according to claim B25 under conditions wherein the anti-MSLN antibody is expressed, and recovering the anti-MSLN antibody. In some embodiments, the present invention provides a method of treating a cancer that includes administering to a patient in need thereof the antibody.

[0027] In another aspect, the present invention provides a heterodimeric antibody that includes: a) a first monomer that includes: i) an anti-CD3 scFv that includes a first variable light domain, an scFv linker and a first variable heavy domain; and ii) a first Fc domain, wherein the scFv is covalently attached to the N-terminus of the first Fc domain using a domain linker; b) a second monomer that includes a VH2-CH1-hinge-CH2-CH3 monomer, wherein VH is a second variable heavy domain and CH2-CH3 is a second Fc domain; and c) a light chain that includes a second variable light domain, wherein the second variable heavy domain and the second variable light domain form a MSLN binding domain.

[0028] In some embodiments, the MSLN binding domain includes the vhCDR1-3 and vlCDR1-3 of any of the following MSLN binding domains: MESO-A[MSLN]_H1.1_L1, MESO-B[MSLN]_H0L0, MESO-C[MSLN]_H1L1, MESO-C[MSLN]_H1.1_L1, MESO-C[MSLN]_H1.2L1, MESO-C[MSLN]_H1.3_L1, MESO-C[MSLN]_H1.4_L1, MESO-C[MSLN]_H1.5_L1, MESO-C[MSLN]_H1.6_L1, MESO-C[MSLN]_H1.7_L1, MESO-C[MSLN]_H1.8_L1, MESO-C[MSLN]_H1.9_L1, MESO-C[MSLN]_H1_L1.1, MESO-C[MSLN]_H1_L1.2, MESO-C[MSLN]_H1_L1.3, MESO-C[MSLN]_H1_L1.4, MESO-C[MSLN]_H1_L1.5, MESO-C[MSLN]_H1_L1.6, MESO-C[MSLN]_H1_L1.7, MESO-C[MSLN]_H1_L1.8, MESO-C[MSLN]_H1_L1.9, MESO-C[MSLN]_H1_L1.10, MESO-C[MSLN]_H1.5_L1.3, MESO-C[MSLN]_H1.6_L1.3, MESO-C[MSLN]_H1.12_L1.9, MESO-C[MSLN]_H1.13_L1.9, MESO-C[MSLN]_H1.3_L1.13, MESO-C[MSLN]_H1.3_L1.14, MESO-C[MSLN]_H1.3_L1.15, MESO-C[MSLN]_H1.3_L1.16, MESO-C[MSLN]_H1.3_L1.17, MESO-C[MSLN]_H1.3_L1.18, MESO-C[MSLN]_H1.3_L1.9, MESO-C[MSLN]_H1.3_L1.5, MESO-C[MSLN]_H1_L1.20, MESO-C[MSLN]_H1.12_L1.20,_MESO-C[MSLN]_H1.14_L1.14, MESO-C[MSLN]_H1.15_L1.14, MESO-C[MSLN]_H1.16_L1.14, MESO-C[MSLN]_H1_L1.19, MESO-C[MSLN]_H1_L1.21, MESO-C[MSLN]_H1_L1.22, MESO-C[MSLN]_H1.12_L1.19, MESO-C[MSLN]_H1.12_L1.21, MESO-C[MSLN]_H1.12_L1.22, and MESO-C[MSLN]_H1.12_L1.9 (FIGS. 15-21).

[0029] In some embodiments, the vhCDR1-3 and vlCDR1-3 of the MSLN binding domain are selected from the vhCDR1-3 and vlCDR1-3 sequences of the MSLN binding domains provided in FIGS. 15-21.

[0030] In some embodiments, the second heavy variable domain includes a heavy variable domain and the second light variable domain includes a variable light domain of any of the following MSLN binding domains: MESO-A[MSLN]_H1.1_L1, MESO-B[MSLN]_H0L0, MESO-C[MSLN]_H1L1, MESO-C[MSLN]_H1.1_L1, MESO-C[MSLN]_H1.2L1, MESO-C[MSLN]_H1.3_L1, MESO-C[MSLN]_H1.4_L1, MESO-C[MSLN]_H1.5_L1, MESO-C[MSLN]_H1.6_L1, MESO-C[MSLN]_H1.7_L1, MESO-C[MSLN]_H1.8_L1, MESO-C[MSLN]_H1.9_L1, MESO-C[MSLN]_H1_L1.1, MESO-C[MSLN]_H1_L1.2, MESO-C[MSLN]_H1_L1.3, MESO-C[MSLN]_H1_L1.4, MESO-C[MSLN]_H1_L1.5, MESO-C[MSLN]_H1_L1.6, MESO-C[MSLN]_H1_L1.7, MESO-C[MSLN]_H1_L1.8, MESO-C[MSLN]_H1_L1.9, MESO-C[MSLN]_H1_L1.10, MESO-C[MSLN]_H1.5_L1.3, MESO-C[MSLN]_H1.6_L1.3, MESO-C[MSLN]_H1.12_L1.9, MESO-C[MSLN]_H1.13_L1.9, MESO-C[MSLN]_H1.3_L1.13, MESO-C[MSLN]_H1.3_L1.14, MESO-C[MSLN]_H1.3_L1.15, MESO-C[MSLN]_H1.3_L1.16, MESO-C[MSLN]_H1.3_L1.17, MESO-C[MSLN]_H1.3_L1.18, MESO-C[MSLN]_H1.3_L1.9, MESO-C[MSLN]_H1.3_L1.5, MESO-C[MSLN]_H1_L1.20, MESO-C[MSLN]_H1.12_L1.20, MESO-C[MSLN]_H1.14_L1.14, MESO-C[MSLN]_H1.15_L1.14, MESO-C[MSLN]_H1.16_L1.14, MESO-C[MSLN]_H1_L1.19, MESO-C[MSLN]_H1_L1.21, MESO-C[MSLN]_H1_L1.22, MESO-C[MSLN]_H1.12_L1.19, MESO-C[MSLN]_H1.12_L1.21, MESO-C[MSLN]_H1.12_L1.22, and MESO-C[MSLN]_H1.12_L1.9 (FIGS. 15-21).

[0031] In some embodiments, the anti-CD3 scFv includes the vhCDR1-3 and the vlCDR1-3 of any of the following CD3 binding domains: H1.30_L1.47, H1.32_L1.47, H1.89_L1.47, H1.90_L1.47, H1.33_L1.47, H1.31_L1.47, L1.47_H1.30, L1.47_H1.30, L1.47_H1.32, L1.47_H1.89, L1.47_H1.90, L1.47_H1.33, and L1.47_H1.31 (FIGS. 10A-10F).

[0032] In some embodiments, the vhCDR1-3 and vlCDR1-3 of the anti-CD3 scFv are selected from the vhCDR1-3 and vlCDR1-3 in FIGS. 10A-10F.

[0033] In some embodiments, the anti-CD3 scFv includes the variable heavy domain and variable light domain of any of the following CD3 binding domains: H1.30_L1.47, H1.32_L1.47, H1.89_L1.47, H1.90_L1.47, H1.33_L1.47, H1.31_L1.47, L1.47_H1.30, L1.47_H1.30, L1.47_H1.32, L1.47_H1.89, L1.47_H1.90, L1.47_H1.33, and L1.47_H1.31 (FIGS. 10A-10F).

[0034] In some embodiments, the first variable light domain is covalently attached to the N-terminus of the first Fc domain using a domain linker.

[0035] In some embodiments, the first variable heavy domain is covalently attached to the N-terminus of the first Fc domain using a domain linker.

[0036] In some embodiments, the scFv linker is a charged scFv linker.

[0037] In some embodiments, the first and second Fc domains are variant Fc domains.

[0038] In some embodiments, the first and second monomers includes a set of heterodimerization variants selected from any of the heterodimerization variants in FIGS. 1A-1E. In some embodiments, the set of heterodimerization variants selected is from following: S364K/E357Q:L368D/K370S; S364K:L368D/K370S; S364K:L368E/K370S; D401K: T411E/K360E/Q362E; and T366W:T366S/L368A/Y407V, wherein numbering is according to EU numbering.

[0039] In some embodiments, the first and second monomers further includes an ablation variant. In some embodiments, the ablation variant is E233P/L234V/L235A/G236del/S267K, wherein numbering is according to EU numbering.

[0040] In some embodiments, one of the first or second monomer includes a pI variant.

[0041] In some embodiments, the pI variant is N208D/Q295E/N384D/Q418E/N421D, wherein numbering is according to EU numbering.

[0042] In some embodiments, the first monomer includes amino acid variants S364K/E357Q/E233P/L234V/L235A/G236del/S267K, wherein the second monomer includes amino acid variants L368D/K370S/N208D/Q295E/N384D/Q418E/N421D/E233P/L234V/L235A/G236del/S267 K, and wherein numbering is according to EU numbering.

[0043] In some embodiments, the scFv linker is a charged scFv linker having the amino acid sequence (GKPGS)₄ (SEQ ID NO: 1).

[0044] In some embodiments, the first and second monomers each further include amino acid variants 428/434S.

[0045] In some embodiments, the heterodimeric antibody includes the following heterodimeric antibodies: XENP16248, XENP16833, XENP31697, XENP32550, XENP32551, XENP32552, XENP32553, XENP32554, XENP32555, XENP32556, XENP32557, XENP32558, XENP32559, XENP32560, XENP32561, XENP32562, XENP32563, XENP32564, XENP32565, XENP32566, XENP32567, XENP32568, XENP32569, XENP32570, XENP32937, XENP32938, XENP32939, XENP32940, XENP32941, XENP32942, XENP32943, XENP32944, XENP32945, XENP32946, XENP33888, XENP33889, XENP30764, XENP30765, XENP31701, XENP33969, XENP33971, XENP33973, XENP16251, XENP16834, XENP16252, and XENP16835 (FIGS. 23-27).

[0046] In another aspect, the present invention provides a heterodimeric antibody that includes: a) a first monomer that includes from N-terminus to C-terminus, a scFv-linker-CH2-CH3, wherein scFv is an anti-CD3 scFV and CH2-CH3 is a first Fc domain; b) a second monomer that includes from N-terminus to C-terminus a VH-CH1-hinge-CH2-CH3, wherein CH2-CH3 is a second Fc domain; and c) a light chain that includes a VL-CL; wherein the first variant Fc domain includes amino acid variants S364K/E357Q, wherein the second variant Fc domain includes amino acid variants L368D/K370S, wherein the first and second variant Fc domains each include amino acid variants E233P/L234V/L235A/G236del/S267K, wherein the hinge-CH2-CH3 of the second monomer includes amino acid variants N208D/Q295E/N384D/Q418E/N421D, wherein the VH and VL form a MSLN binding domain that includes the variable heavy domain and the variable light domain, respectively, of a MSLN binding domain selected from: MESO-A[MSLN]_H1.1_L1, MESO-B[MSLN]_H0L0, MESO-C[MSLN]_H1L1, MESO-C[MSLN]_H1.1_L1, MESO-C[MSLN]_H1.2L1, MESO-C[MSLN]_H1.3_L1, MESO-C[MSLN]_H1.4_L1, MESO-C[MSLN]_H1.5_L1, MESO-C[MSLN]_H1.6_L1, MESO-C[MSLN]_H1.7_L1, MESO-C[MSLN]_H1.8_L1, MESO-C[MSLN]_H1.9_L1, MESO-C[MSLN]_H1_L1.1, MESO-C[MSLN]_H1_L1.2, MESO-C[MSLN]_H1_L1.3, MESO-C[MSLN]_H1_L1.4, MESO-C[MSLN]_H1_L1.5, MESO-C[MSLN]_H1_L1.6, MESO-C[MSLN]_H1_L1.7, MESO-C[MSLN]_H1_L1.8, MESO-C[MSLN]_H1_L1.9, MESO-C[MSLN]_H1_L1.10, MESO-C[MSLN]_H1.5_L1.3, MESO-C[MSLN]_H1.6_L1.3, MESO-C[MSLN]_H1.12_L1.9, MESO-C[MSLN]_H1.13_L1.9, MESO-C[MSLN]_H1.3_L1.13, MESO-C[MSLN]_H1.3_L1.14, MESO-C[MSLN]_H1.3_L1.15, MESO-C[MSLN]_H1.3_L1.16, MESO-C[MSLN]_H1.3_L1.17, MESO-C[MSLN]_H1.3_L1.18, MESO-C[MSLN]_H1.3_L1.9, MESO-C[MSLN]_H1.3_L1.5, MESO-C[MSLN]_H1_L1.20, MESO-C[MSLN]_H1.12_L1.20,_MESO-C[MSLN]_H1.14_L1.14, MESO-C[MSLN]_H1.15_L1.14, MESO-C[MSLN]_H1.16_L1.14, MESO-C[MSLN]_H1_L1.19, MESO-C[MSLN]_H1_L1.21, MESO-C[MSLN]_H1_L1.22, MESO-C[MSLN]_H1.12_L1.19, MESO-C[MSLN]_H1.12_L1.21, MESO-C[MSLN]_H1.12_L1.22, and MESO-C[MSLN]_H1.12_L1.9 (FIGS. 15-21), wherein the anti-CD3 scFv includes the variable heavy domain and the variable light domain of a CD3 binding domain selected from H1.30_L1.47, H1.32_L1.47, H1.89_L1.47, H1.90_L1.47, H1.33_L1.47, H1.31_L1.47, L1.47_H1.30, L1.47_H1.30, L1.47_H1.32, L1.47_H1.89, L1.47_H1.90, L1.47_H1.33, and L1.47_H1.31 (FIGS. 10A-10F), and wherein numbering is according to EU numbering.

[0047] In some embodiments, the scFv includes a charged scFv linker having the amino acid sequence (GKPGS)₄ (SEQ ID NO: 1).

[0048] In some embodiments, the first and second variant Fc domains each further include amino acid variants 428/434S, wherein numbering is according to EU numbering.

[0049] In some embodiments, the present invention provides a nucleic acid composition that includes nucleic acids encoding the first and second monomers and the light chain of the antibody.

[0050] In some embodiments, the present invention provides an expression vector that includes the nucleic acids. In some embodiments, the present invention provides a host cell transformed with the expression vector.

[0051] In some embodiments, the present invention provides a method of treating a MSLN associated cancer that includes administering to a patient in need thereof any one of the antibodies provided herein.

[0052] In another aspect, the present invention provides a heterodimeric antibody that includes: a) a first monomer that includes from N-terminus to C-terminus, a VH1-CH1-linker 1-scFv-linker 2-CH2-CH3, wherein VH1 is a first variable heavy domain, scFv is an anti-CD3 scFV, linker 1 and linker 2 are a first domain linker and second domain linker, respectively, and CH2-CH3 is a first Fc domain; b) a second monomer that includes from N-terminus to C-terminus a VH2-CH1-hinge-CH2-CH3, wherein VH2 is a second variable heavy domain and CH2-CH3 is a second Fc domain; and c) a common light chain that includes a variable light domain; wherein the first variable heavy domain and the variable light domain form a first MSLN binding domain, and the second variable heavy domain and the variable light domain form a second MSLN binding domain.

[0053] In some embodiments, the first and second MSLN binding domains each includes the vhCDR1-3 and vlCDR1-3 of any of the following MSLN binding domains: MESO-A[MSLN]_H1.1_L1, MESO-B[MSLN]_H0L0, MESO-C[MSLN]_H1L1, MESO-C[MSLN]_H1.1_L1, MESO-C[MSLN]_H1.2L1, MESO-C[MSLN]_H1.3_L1, MESO-C[MSLN]_H1.4_L1, MESO-C[MSLN]_H1.5_L1, MESO-C[MSLN]_H1.6_L1, MESO-C[MSLN]_H1.7_L1, MESO-C[MSLN]_H1.8_L1, MESO-C[MSLN]_H1.9_L1, MESO-C[MSLN]_H1_L1.1, MESO-C[MSLN]_H1_L1.2, MESO-C[MSLN]_H1_L1.3, MESO-C[MSLN]_H1_L1.4, MESO-C[MSLN]_H1_L1.5, MESO-C[MSLN]_H1_L1.6, MESO-C[MSLN]_H1_L1.7, MESO-C[MSLN]_H1_L1.8, MESO-C[MSLN]_H1_L1.9, MESO-C[MSLN]_H1_L1.10, MESO-C[MSLN]_H1.5_L1.3, MESO-C[MSLN]_H1.6_L1.3, MESO-C[MSLN]_H1.12_L1.9, MESO-C[MSLN]_H1.13_L1.9, MESO-C[MSLN]_H1.3_L1.13, MESO-C[MSLN]_H1.3_L1.14, MESO-C[MSLN]_H1.3_L1.15, MESO-C[MSLN]_H1.3_L1.16, MESO-C[MSLN]_H1.3_L1.17, MESO-C[MSLN]_H1.3_L1.18, MESO-C[MSLN]_H1.3_L1.9, MESO-C[MSLN]_H1.3_L1.5, MESO-C[MSLN]_H1_L1.20, MESO-C[MSLN]_H1.12_L1.20,MESO-C[MSLN]_H1.14_L1.14, MESO-C[MSLN]_H1.15_L1.14, MESO-C[MSLN]_H1.16_L1.14, MESO-C[MSLN]_H1_L1.19, MESO-C[MSLN]_H1_L1.21, MESO-C[MSLN]_H1_L1.22, MESO-C[MSLN]_H1.12_L1.19, MESO-C[MSLN]_H1.12_L1.21, MESO-C[MSLN]_H1.12_L1.22, and MESO-C[MSLN]_H1.12_L1.9 (FIGS. 15-21),

[0054] In some embodiments, the vhCDR1-3 and vlCDR1-3 of the first and second MSLN binding domains are selected from the vhCDR1-3 and vlCDR1-3 provided in FIGS. 15-21.

[0055] In some embodiments, the first and second variable heavy domain each include a variable heavy domain of a MSLN binding domain, and the first and second variable light domain each include a variable light domain of the MSLN binding domain, wherein the MSLN binding domain is any of the following MSLN binding domains: MESO-A[MSLN]_H1.1_L1, MESO-B[MSLN]_H0L0, MESO-C[MSLN]_H1L1, MESO-C[MSLN]_H1.1_L1, MESO-C[MSLN]_H1.2L1, MESO-C[MSLN]_H1.3_L1, MESO-C[MSLN]_H1.4_L1, MESO-C[MSLN]_H1.5_L1, MESO-C[MSLN]_H1.6_L1, MESO-C[MSLN]_H1.7_L1, MESO-C[MSLN]_H1.8_L1, MESO-C[MSLN]_H1.9_L1, MESO-C[MSLN]_H1_L1.1, MESO-C[MSLN]_H1_L1.2, MESO-C[MSLN]_H1_L1.3, MESO-C[MSLN]_H1_L1.4, MESO-C[MSLN]_H1_L1.5, MESO-C[MSLN]_H1_L1.6, MESO-C[MSLN]_H1_L1.7, MESO-C[MSLN]_H1_L1.8, MESO-C[MSLN]_H1_L1.9, MESO-C[MSLN]_H1_L1.10, MESO-C[MSLN]_H1.5_L1.3, MESO-C[MSLN]_H1.6_L1.3, MESO-C[MSLN]_H1.12_L1.9, MESO-C[MSLN]_H1.13_L1.9, MESO-C[MSLN]_H1.3_L1.13, MESO-C[MSLN]_H1.3_L1.14, MESO-C[MSLN]_H1.3_L1.15, MESO-C[MSLN]_H1.3_L1.16, MESO-C[MSLN]_H1.3_L1.17, MESO-C[MSLN]_H1.3_L1.18, MESO-C[MSLN]_H1.3_L1.9, MESO-C[MSLN]_H1.3_L1.5, MESO-C[MSLN]_H1_L1.20, MESO-C[MSLN]_H1.12_L1.20,MESO-C[MSLN]_H1.14_L1.14, MESO-C[MSLN]_H1.15_L1.14, MESO-C[MSLN]_H1.16_L1.14, MESO-C[MSLN]_H1_L1.19, MESO-C[MSLN]_H1_L1.21, MESO-C[MSLN]_H1_L1.22, MESO-C[MSLN]_H1.12_L1.19, MESO-C[MSLN]_H1.12_L1.21, MESO-C[MSLN]_H1.12_L1.22, and MESO-C[MSLN]_H1.12_L1.9 (FIGS. 15-21).

[0056] In some embodiments, the scFv includes the vhCDR1-3 and the vlCDR1-3 of any of the following CD3 binding domains: H1.30_L1.47, H1.32_L1.47, H1.89_L1.47, H1.90_L1.47, H1.33_L1.47, H1.31_L1.47, L1.47_H1.30, L1.47_H1.30, L1.47_H1.32, L1.47_H1.89, L1.47_H1.90, L1.47_H1.33, and L1.47_H1.31 (FIGS. 10A-10F).

[0057] In some embodiments, the vhCDR1-3 and vlCDR1-3 of the scFv are selected from the vhCDR1-3 and vlCDR1-3 in FIGS. 10A-10F.

[0058] In some embodiments, the scFv includes the variable heavy domain and variable light domain of any of the following CD3 binding domains: H1.30_L1.47, H1.32_L1.47, H1.89_L1.47, H1.90_L1.47, H1.33_L1.47, H1.31_L1.47, L1.47_H1.30, L1.47_H1.30, L1.47_H1.32, L1.47_H1.89, L1.47_H1.90, L1.47_H1.33, and L1.47_H1.31 (FIGS. 10A-10F).

[0059] In some embodiments, the scFv includes an scFv variable heavy domain, an scFv variable light domain and an scFv linker that connects the scFv variable heavy domain and the scFv variable light domain.

[0060] In some embodiments, the scFv variable heavy domain is attached to the C-terminus of the CH1 of the first monomer using the first domain linker and the scFv variable light domain is covalently attached to the N-terminus of the first Fc domain using the second domain linker.

[0061] In some embodiments, the scFv variable light domain is attached to the C-terminus of the CH1 of the first monomer using the first domain linker and the scFv variable heavy domain is covalently attached to the N-terminus of the first Fc domain using the second domain linker.

[0062] In some embodiments, the scFv linker is a charged scFv linker.

[0063] In some embodiments, the first and second Fc domains are variant Fc domains.

[0064] In some embodiments, the first and second monomers includes a set of heterodimerization variants selected from those depicted in FIGS. 1A-1E.

[0065] In some embodiments, the set of heterodimerization variants selected is from following: S364K/E357Q:L368D/K370S; S364K:L368D/K370S; S364K:L368E/K370S; D401K:T411E/K360E/Q362E; and T366W:T366S/L368A/Y407V, wherein numbering is according to EU numbering.

[0066] In some embodiments, the first and second monomers further include an ablation variant.

[0067] In some embodiments, the ablation variant is E233P/L234V/L235A/G236del/S267K, wherein numbering is according to EU numbering.

[0068] In some embodiments, one of the first or second monomer further includes a pI variant.

[0069] In some embodiments, the pI variant is N208D/Q295E/N384D/Q418E/N421D, wherein numbering is according to EU numbering.

[0070] In some embodiments, first variant Fc domain includes amino acid variants S364K/E357Q/E233P/L234V/L235A/G236del/S267K, wherein the second variant Fc domain includes amino acid variants L368D/K370S/N208D/Q295E/N384D/Q418E/N421D/E233P/L234V/L235A/G236del/S267 K, and wherein numbering is according to EU numbering.

[0071] In some embodiments, the scFv linker is a charged scFv linker having the amino acid sequence (GKPGS)₄ (SEQ ID NO: 1).

[0072] In some embodiments, the first and second variant Fc domains each further include amino acid variants 428/434S, wherein numbering is according to EU numbering.

[0073] In some embodiments, the heterodimeric antibody includes the following heterodimeric antibodies: XENP31063, XENP31067, XENP31705, XENP31451, XENP31452, XENP31713, XENP31064, XENP31068, XENP31709, ENP32744, XENP32747, XENP32750, XENP32851, XENP31453, XENP31454, XENP31717, XENP32745, XENP32748, XENP32751, XENP32852, XENP32947, XENP32948, XENP32949, XENP32950, XENP32951, XENP33366, XENP33367, XENP33460, XENP33461, XENP33462, XENP33463, XENP33464, XENP33465, XENP33466, XENP33467, XENP33968, XENP33970, XENP33972, XENP34155, XENP34156, XENP34157, XENP34158, XENP31455, XENP31456, XENP32249, XENP32250, XENP32251, XENP32746, XENP32749, XENP32752, XENP32853, XENP33974, XENP33975, XENP33976, XENP33977, XENP33978, XENP33979, XENP33980, XENP34151, XENP34152, XENP34153, XENP34154, XENP34159, XENP34160, XENP34161, and XENP34162 (FIGS. 28-32).

[0074] In another aspect, the heterodimeric antibody includes: a) a first monomer that includes from N-terminus to C-terminus, a VH1-CH1-linker 1-scFv-linker 2-CH2-CH3, wherein scFv is an anti-CD3 scFV and CH2-CH3 is a first Fc domain; b) a second monomer that includes from N-terminus to C-terminus a VH1-CH1-hinge-CH2-CH3, wherein CH2-CH3 is a second Fc domain; and c) a common light chain that includes VL-CL; wherein the first variant Fc domain includes amino acid variants S364K/E357Q, wherein the second variant Fc domain includes amino acid variants L368D/K370S, wherein the first and second variant Fc domains each include amino acid variants E233P/L234V/L235A/G236del/S267K, wherein the hinge-CH2-CH3 of the second monomer includes amino acid variants N208D/Q295E/N384D/Q418E/N421D, wherein said VH and VL include the variable heavy domain and the variable light domain of a MSLN binding domain selected from: MESO-A[MSLN]_H1.1_L1, MESO-B[MSLN]_H0L0, MESO-C[MSLN]_H1L1, MESO-C[MSLN]_H1.1_L1, MESO-C[MSLN]_H1.2L1, MESO-C[MSLN]_H1.3_L1, MESO-C[MSLN]_H1.4_L1, MESO-C[MSLN]_H1.5_L1, MESO-C[MSLN]_H1.6_L1, MESO-C[MSLN]_H1.7_L1, MESO-C[MSLN]_H1.8_L1, MESO-C[MSLN]_H1.9_L1, MESO-C[MSLN]_H1_L1.1, MESO-C[MSLN]_H1_L1.2, MESO-C[MSLN]_H1_L1.3, MESO-C[MSLN]_H1_L1.4, MESO-C[MSLN]_H1_L1.5, MESO-C[MSLN]_H1_L1.6, MESO-C[MSLN]_H1_L1.7, MESO-C[MSLN]_H1_L1.8, MESO-C[MSLN]_H1_L1.9, MESO-C[MSLN]_H1_L1.10, MESO-C[MSLN]_H1.5_L1.3, MESO-C[MSLN]_H1.6_L1.3, MESO-C[MSLN]_H1.12_L1.9, MESO-C[MSLN]_H1.13_L1.9, MESO-C[MSLN]_H1.3_L1.13, MESO-C[MSLN]_H1.3_L1.14, MESO-C[MSLN]_H1.3_L1.15, MESO-C[MSLN]_H1.3_L1.16, MESO-C[MSLN]_H1.3_L1.17, MESO-C[MSLN]_H1.3_L1.18, MESO-C[MSLN]_H1.3_L1.9, MESO-C[MSLN]_H1.3_L1.5, MESO-C[MSLN]_H1_L1.20, MESO-C[MSLN]_H1.12_L1.20,MESO-C[MSLN]_H1.14_L1.14, MESO-C[MSLN]_H1.15_L1.14, MESO-C[MSLN]_H1.16_L1.14, MESO-C[MSLN]_H1_L1.19, MESO-C[MSLN]_H1_L1.21, MESO-C[MSLN]_H1_L1.22, MESO-C[MSLN]_H1.12_L1.19, MESO-C[MSLN]_H1.12_L1.21, MESO-C[MSLN]_H1.12_L1.22, and MESO-C[MSLN]_H1.12_L1.9 (FIGS. 15-21), wherein the anti-CD3 scFv includes the variable heavy domain and the variable light domain of a CD3 binding domain selected from H1.30_L1.47, H1.32_L1.47, H1.89_L1.47, H1.90_L1.47, H1.33_L1.47, H1.31_L1.47, L1.47_H1.30, L1.47_H1.30, L1.47_H1.32, L1.47_H1.89, L1.47_H1.90, L1.47_H1.33, and L1.47_H1.31 (FIGS. 10A-10F), and wherein numbering is according to EU numbering.

[0075] In some embodiments, the scFv includes a charged scFv linker having the amino acid sequence (GKPGS)₄ (SEQ ID NO: 1).

[0076] In some embodiments, the first and second variant Fc domains each further include amino acid variants 428/434S.

[0077] In some embodiments, the first and second monomers and the common light chain of the antibody. In some embodiments, the present invention provides an expression vector that includes the nucleic acids. In some embodiments, the present invention provides a host cell transformed with the expression vector. In some embodiments, the present invention provides treating a MSLN associated cancer includes administering to a patient in need thereof the antibody.

[0078] In another aspect, the present invention provides a heterodimeric antibody including the following heterodimeric antibodies: XENP16248, XENP16833, XENP31697, XENP32550, XENP32551, XENP32552, XENP32553, XENP32554, XENP32555, XENP32556, XENP32557, XENP32558, XENP32559, XENP32560, XENP32561, XENP32562, XENP32563, XENP32564, XENP32565, XENP32566, XENP32567, XENP32568, XENP32569, XENP32570, XENP32937, XENP32938, XENP32939, XENP32940, XENP32941, XENP32942, XENP32943, XENP32944, XENP32945, XENP32946, XENP33888, XENP33889, XENP30764, XENP30765, XENP31701, XENP33969, XENP33971, XENP33973, XENP16251, XENP16834, XENP16252, and XENP16835 (FIGS. 23-27).

[0079] In another aspect, the present invention provides a heterodimeric antibody including the following heterodimeric antibodies: XENP31063, XENP31067, XENP31705, XENP31451, XENP31452, XENP31713, XENP31064, XENP31068, XENP31709, ENP32744, XENP32747, XENP32750, XENP32851, XENP31453, XENP31454, XENP31717, XENP32745, XENP32748, XENP32751, XENP32852, XENP32947, XENP32948, XENP32949, XENP32950, XENP32951, XENP33366, XENP33367, XENP33460, XENP33461, XENP33462, XENP33463, XENP33464, XENP33465, XENP33466, XENP33467, XENP33968, XENP33970, XENP33972, XENP34155, XENP34156, XENP34157, XENP34158, XENP31455, XENP31456, XENP32249, XENP32250, XENP32251, XENP32746, XENP32749, XENP32752, XENP32853, XENP33974, XENP33975, XENP33976, XENP33977, XENP33978, XENP33979, XENP33980, XENP34151, XENP34152, XENP34153, XENP34154, XENP34159, XENP34160, XENP34161, and XENP34162 (FIGS. 28-32).

[0080] In some embodiments, the present invention provides nucleic acid composition that includes the nucleic acids encoding the heterodimeric antibody. In some embodiments, the present invention provides an expression vector includes the nucleic acids. In some embodiments, the present invention provides a host cell transformed with the expression vector.

[0081] In some embodiments, the present method provides a method of treating a MSLN related cancer that includes administering to a patient in need thereof any one of the heterodimeric antibodies provided herein.

### BRIEF DESCRIPTION OF THE DRAWINGS

[0082] FIG. 1A-1E depict useful pairs of Fc heterodimerization variant sets (including skew and pI variants). There are variants for which there are no corresponding “monomer 2” variants; these are pI variants which can be used alone on either monomer.

[0083] FIG. 2 depicts a list of isosteric variant antibody constant regions and their respective substitutions. pI_(−) indicates lower pI variants, while pI_(+) indicates higher pI variants. These can be optionally and independently combined with other heterodimerization variants of the inventions (and other variant types as well, as outlined herein.)

[0084] FIG. 3 depicts useful ablation variants that ablate FcγR binding (sometimes referred to as “knock outs” or “KO” variants). Generally, ablation variants are found on both monomers, although in some cases they may be on only one monomer.

[0085] FIG. 4 depicts particularly useful embodiments of “non-Fv” components of the antibodies described herein.

[0086] FIG. 5 depicts a number of charged scFv linkers that find use in increasing or decreasing the pI of the subject heterodimeric bsAbs that utilize one or more scFv as a component, as described herein. The (+H) positive linker finds particular use herein, particularly with anti-CD3 V_{L} and V_{H} sequences shown herein. A single prior art scFv linker with a single charge is referenced as “Whitlow”, from Whitlow et al., Protein Engineering 6(8):989-995 (1993). It should be noted that this linker was used for reducing aggregation and enhancing proteolytic stability in scFvs. Such charged scFv linkers can be used in any of the subject antibody formats disclosed herein that include scFvs (e.g., 1+1 Fab-scFv-Fc and 2+1 Fab₂-scFv-Fc formats).

[0087] FIG. 6 depicts a number of exemplary domain linkers. In some embodiments, these linkers find use linking a single-chain Fv to an Fc chain. In some embodiments, these linkers may be combined. For example, a GGGGS linker (SEQ ID NO: 2) may be combined with a “half hinge” linker.

[0088] FIGS. 7A-7D depict the sequences of several useful 1+1 Fab-scFv-Fc bispecific antibody format heavy chain backbones based on human IgG1, without the Fv sequences (e.g. the scFv and the VH for the Fab side). Backbone 1 is based on human IgG1 (356E/358M allotype), and includes the S364K/E357Q:L368D/K370S skew variants, C220S on the chain with the S364K/E357Q skew variants, the N208D/Q295E/N384D/Q418E/N421D pI variants on the chain with L368D/K370S skew variants and the E233P/L234V/L235A/G236del/S267K ablation variants on both chains. Backbone 2 is based on human IgG1 (356E/358M allotype), and includes S364K:L368D/K370S skew variants, C220S on the chain with the S364K skew variant, the N208D/Q295E/N384D/Q418E/N421D pI variants on the chain with L368D/K370S skew variants, and the E233P/L234V/L235A/G236del/S267K ablation variants on both chains. Backbone 3 is based on human IgG1 (356E/358M allotype), and includes S364K:L368E/K370S skew variants, C220S on the chain with the S364K skew variant, the N208D/Q295E/N384D/Q418E/N421D pI variants on the chain with L368E/K370S skew variants and the E233P/L234V/L235A/G236del/S267K ablation variants on both chains. Backbone 4 is based on human IgG1 (356E/358M allotype), and includes D401K:K360E/Q362E/T411E skew variants, C220S on the chain with the D401K skew variant, the N208D/Q295E/N384D/Q418E/N421D pI variants on the chain with K360E/Q362E/T411E skew variants and the E233P/L234V/L235A/G236del/S267K ablation variants on both chains. Backbone 5 is based on human IgG1 (356D/358L allotype), and includes S364K/E357Q:L368D/K370S skew variants, C220S on the chain with the S364K/E357Q skew variants, the N208D/Q295E/N384D/Q418E/N421D pI variants on the chain with L368D/K370S skew variants and the E233P/L234V/L235A/G236del/S267K ablation variants on both chains. Backbone 6 is based on human IgG1 (356E/358M allotype), and includes S364K/E357Q:L368D/K370S skew variants, C220S on the chain with the S364K/E357Q skew variants, N208D/Q295E/N384D/Q418E/N421D pI variants on the chain with L368D/K370S skew variants and the E233P/L234V/L235A/G236del/S267K ablation variants on both chains, as well as an N297A variant on both chains. Backbone 7 is identical to 6 except the mutation is N297S. Backbone 8 is based on human IgG4, and includes the S364K/E357Q:L368D/K370S skew variants, the N208D/Q295E/N384D/Q418E/N421D pI variants on the chain with L368D/K370S skew variants, as well as a S228P (EU numbering, this is S241P in Kabat) variant on both chains that ablates Fab arm exchange as is known in the art. Backbone 9 is based on human IgG2, and includes the S364K/E357Q:L368D/K370S skew variants, the N208D/Q295E/N384D/Q418E/N421D pI variants on the chain with L368D/K370S skew variants. Backbone 10 is based on human IgG2, and includes the S364K/E357Q:L368D/K370S skew variants, the N208D/Q295E/N384D/Q418E/N421D pI variants on the chain with L368D/K370S skew variants as well as a S267K variant on both chains. Backbone 11 is identical to backbone 1, except it includes M428L/N434S Xtend mutations. Backbone 12 is based on human IgG1 (356E/358M allotype), and includes S364K/E357Q:L368D/K370S skew variants, C220S and the P217R/P229R/N276K pI variants on the chain with S364K/E357Q skew variants and the E233P/L234V/L235A/G236del/S267K ablation variants on both chains. Included within each of these backbones are sequences that are 90, 95, 98 and 99% identical (as defined herein) to the recited sequences, and/or contain from 1, 2, 3, 4, 5, 6, 7, 8, 9 or 10 additional amino acid substitutions (as compared to the “parent” of the Figure, which, as will be appreciated by those in the art, already contain a number of amino acid modifications as compared to the parental human IgG1 (or IgG2 or IgG4, depending on the backbone). That is, the recited backbones may contain additional amino acid modifications (generally amino acid substitutions) in addition to the skew, pI and ablation variants contained within the backbones of this figure.

[0089] FIGS. 8A-8C depicts the sequences of several useful 2+1 Fab₂-scFv-Fc bispecific antibody format heavy chain backbones based on human IgG1, without the Fv sequences (e.g. the scFv and the VH for the Fab side). Backbone 1 is based on human IgG1 (356E/358M allotype), and includes the S364K/E357Q:L368D/K370S skew variants, the N208D/Q295E/N384D/Q418E/N421D pI variants on the chain with L368D/K370S skew variants and the E233P/L234V/L235A/G236del/S267K ablation variants on both chains. Backbone 2 is based on human IgG1 (356E/358M allotype), and includes S364K:L368D/K370S skew variants, the N208D/Q295E/N384D/Q418E/N421D pI variants on the chain with L368D/K370S skew variants, and the E233P/L234V/L235A/G236del/S267K ablation variants on both chains. Backbone 3 is based on human IgG1 (356E/358M allotype), and includes S364K:L368E/K370S skew variants, the N208D/Q295E/N384D/Q418E/N421D pI variants on the chain with L368E/K370S skew variants and the E233P/L234V/L235A/G236del/S267K ablation variants on both chains. Backbone 4 is based on human IgG1 (356E/358M allotype), and includes D401K:K360E/Q362E/T411E skew variants, the N208D/Q295E/N384D/Q418E/N421D pI variants on the chain with K360E/Q362E/T411E skew variants and the E233P/L234V/L235A/G236del/S267K ablation variants on both chains. Backbone 5 is based on human IgG1 (356D/358L allotype), and includes S364K/E357Q:L368D/K370S skew variants, the N208D/Q295E/N384D/Q418E/N421D pI variants on the chain with L368D/K370S skew variants and the E233P/L234V/L235A/G236del/S267K ablation variants on both chains. Backbone 6 is based on human IgG1 (356E/358M allotype), and includes S364K/E357Q:L368D/K370S skew variants, N208D/Q295E/N384D/Q418E/N421D pI variants on the chain with L368D/K370S skew variants and the E233P/L234V/L235A/G236del/S267K ablation variants on both chains, as well as an N297A variant on both chains. Backbone 7 is identical to 6 except the mutation is N297S. Backbone 8 is identical to backbone 1, except it includes M428L/N434S Xtend mutations. Backbone 9 is based on human IgG1 (356E/358M allotype), and includes S364K/E357Q:L368D/K370S skew variants, the P217R/P229R/N276K pI variants on the chain with S364K/E357Q skew variants and the E233P/L234V/L235A/G236del/S267K ablation variants on both chains. Included within each of these backbones are sequences that are 90, 95, 98 and 99% identical (as defined herein) to the recited sequences, and/or contain from 1, 2, 3, 4, 5, 6, 7, 8, 9 or 10 additional amino acid substitutions (as compared to the “parent” of the Figure, which, as will be appreciated by those in the art, already contain a number of amino acid modifications as compared to the parental human IgG1 (or IgG2 or IgG4, depending on the backbone). That is, the recited backbones may contain additional amino acid modifications (generally amino acid substitutions) in addition to the skew, pI and ablation variants contained within the backbones of this figure.

[0090] FIG. 9 depicts the sequences of several useful constant light domain backbones based on human IgG1, without the Fv sequences (e.g. the scFv or the Fab). Included herein are constant light backbone sequences that are 90, 95, 98 and 99% identical (as defined herein) to the recited sequences, and/or contain from 1, 2, 3, 4, 5, 6, 7, 8, 9 or 10 additional amino acid modifications.

[0091] FIGS. 10A-10F depicts sequences for exemplary anti-CD3 scFvs suitable for use in the bispecific antibodies of the invention. The CDRs are underlined, the scFv linker is double underlined (in the sequences, the scFv linker is a positively charged scFv (GKPGS)₄ linker (SEQ ID NO: 1), although as will be appreciated by those in the art, this linker can be replaced by other linkers, including uncharged or negatively charged linkers, some of which are depicted in FIG. 5), and the slashes indicate the border(s) of the variable domains. In addition, the naming convention illustrates the orientation of the scFv from N- to C-terminus. As noted herein and is true for every sequence herein containing CDRs, the exact identification of the CDR locations may be slightly different depending on the numbering used as is shown in Table X, and thus included herein are not only the CDRs that are underlined but also CDRs included within the V_{H} and V_{L} domains using other numbering systems. Furthermore, as for all the sequences in the Figures, these V_{H} and V_{L} sequences can be used either in a scFv format or in a Fab format.

[0092] FIG. 11 depicts illustrative IHC of ovarian cancer biopsy cores and adjacent normal tissue showing mesothelin expression.

[0093] FIG. 12 depicts breakdown of IHC scores of 191 ovarian cancer biopsy cores showing mesothelin expression.

[0094] FIG. 13 depicts endogenous mesothelin expression on cancer cell lines as determined by IHC and flow.

[0095] FIGS. 14A-14B depict the antigen sequences for a number of antigens of use in the antibodies described herein, including both human and cyno, to facilitate the development of antigen binding domains that bind to both for ease of clinical development.

[0096] FIGS. 15A-15B depict the variable heavy and variable light chain sequences for an exemplary MSLN binding domain referred to herein as MESO-A, as well as the sequences for XENP16249, XENP16250, and XENP16253, anti-MSLN mAbs based on MESO-A and IgG1 backbone. CDRs are underlined and slashes indicate the border(s) between the variable regions and constant domain. As noted herein and is true for every sequence herein containing CDRs, the exact identification of the CDR locations may be slightly different depending on the numbering used as is shown in Table X, and thus included herein are not only the CDRs that are underlined but also CDRs included within the VH and VL domains using other numbering systems. Furthermore, as for all the sequences in the Figures, these V_{H} and V_{L} sequences can be used either in a scFv format or in a Fab format.

[0097] FIG. 16 depicts the variable heavy and variable light chain sequences for an exemplary MSLN binding domain referred to herein as MESO-B, as well as the sequences for XENP16827, an anti-MSLN mAb based on MESO-B and IgG1 backbone. CDRs are underlined and slashes indicate the border(s) between the variable regions and constant domain. As noted herein and is true for every sequence herein containing CDRs, the exact identification of the CDR locations may be slightly different depending on the numbering used as is shown in Table X, and thus included herein are not only the CDRs that are underlined but also CDRs included within the V_{H} and V_{L} domains using other numbering systems. Furthermore, as for all the sequences in the Figures, these V_{H} and V_{L} sequences can be used either in a scFv format or in a Fab format.

[0098] FIG. 17 depicts the variable heavy and variable light chain sequences for an exemplary MSLN binding domain referred to herein as MESO-C, as well as the sequences for XENP31693, an anti-MSLN mAb based on MESO-C and IgG1 backbone. CDRs are underlined and slashes indicate the border(s) between the variable regions and constant domain. As noted herein and is true for every sequence herein containing CDRs, the exact identification of the CDR locations may be slightly different depending on the numbering used as is shown in Table X, and thus included herein are not only the CDRs that are underlined but also CDRs included within the V_{H} and V_{L} domains using other numbering systems. Furthermore, as for all the sequences in the Figures, these V_{H} and V_{L} sequences can be used either in a scFv format or in a Fab format.

[0099] FIG. 18 depicts the variable heavy chain sequences for MESO-C variants engineered with the aim to tune binding affinity for human MSLN. CDRs are underlined and slashes indicate the border(s) between the variable regions and constant domain. As noted herein and is true for every sequence herein containing CDRs, the exact identification of the CDR locations may be slightly different depending on the numbering used as is shown in Table X, and thus included herein are not only the CDRs that are underlined but also CDRs included within V_{H} domains using other numbering systems. Further, as for all the sequences in the Figures, these V_{L} sequences can be used either in a scFv format or in a Fab format. Each of the variable heavy domains depicted herein can be paired with any other αMSLN variable light domain.

[0100] FIGS. 19A-19B depict the variable light chain sequences for MESO-C variants engineered with the aim to tune binding affinity for human MSLN. CDRs are underlined and slashes indicate the border(s) between the variable regions and constant domain. As noted herein and is true for every sequence herein containing CDRs, the exact identification of the CDR locations may be slightly different depending on the numbering used as is shown in Table X, and thus included herein are not only the CDRs that are underlined but also CDRs included within V_{L} domains using other numbering systems. Further, as for all the sequences in the Figures, these V_{L} sequences can be used either in a scFv format or in a Fab format. Each of the variable light domains depicted herein can be paired with any other αMSLN variable heavy domain.

[0101] FIG. 20 depicts BLI-response, dissociation constant (K_{D}), association rate (kₐ), and dissociation rate (k_{d}) of affinity-engineered MESO-C variants (in the context of 1+1 Fab-scFv-Fc anti-MSLN x anti-CD3 bispecific antibodies) for human and cynomolgus MSLN as determined by Octet. Substitutions in variable regions are based on Kabat numbering. It should be noted that for Kabat numbering, some positions are numbered using letters as well; for example, in Kabat numbering, there is one amino acid at position 100b (K100b) but a different amino acid at position 100a (P100a); that is, the inclusion of the small letters denotes a position, not a particular amino acid in that position.

[0102] FIG. 21 depicts BLI-response, dissociation constant (K_{D}), association rate (kₐ), and dissociation rate (k_{d}) of affinity-engineered MESO-C variants (in the context of 1+1 Fab-scFv-Fc anti-MSLN x anti-CD3 bispecific antibodies) for human MSLN as determined by Octet (multiple concentration Octet run). Substitutions in variable regions are based on Kabat numbering.

[0103] FIGS. 22A-22B depict a couple of formats of the present invention. FIG. 22A depicts the “1+1 Fab-scFv-Fc” format, with a first Fab arm binding MSLN and a second scFv arm binding CD3. FIG. 22B depicts the “2+1 Fab₂-scFv-Fc” format, with a first Fab arm binding MSLN and a second Fab-scFv arm, wherein the Fab binds MSLN and the scFv binds CD3.

[0104] FIGS. 23A-23R depict the sequences for illustrative αMSLN x αCD3 bsAbs in the 1+1 Fab-scFv-Fc format and comprising a H1.30_L1.47 anti-CD3 scFv (a.k.a. CD3 High[VHVL]). CDRs are underlined and slashes indicate the border(s) between the variable regions and other chain components (e.g. constant region and domain linkers). It should be noted that the αMSLN x αCD3 bsAbs can utilize variable region, Fc region, and constant domain sequences that are 90, 95, 98 and 99% identical (as defined herein), and/or contain from 1, 2, 3, 4, 5, 6, 7, 8, 9 or 10 amino acid substitutions. In addition, each sequence outlined herein can include or exclude the M428L/N434S variants in one or preferably both Fc domains, which results in longer half-life in serum.

[0105] FIGS. 24A-24B depict the sequences for illustrative αMSLN x αCD3 bsAbs in the 1+1 Fab-scFv-Fc format and comprising a H1.32_L1.47 anti-CD3 scFv (a.k.a. CD3 High-Int#1[VHVL]). CDRs are underlined and slashes indicate the border(s) between the variable regions and other chain components (e.g. constant region and domain linkers). It should be noted that the αMSLN x αCD3 bsAbs can utilize variable region, Fc region, and constant domain sequences that are 90, 95, 98 and 99% identical (as defined herein), and/or contain from 1, 2, 3, 4, 5, 6, 7, 8, 9 or 10 amino acid substitutions. In addition, each sequence outlined herein can include or exclude the M428L/N434S variants in one or preferably both Fc domains, which results in longer half-life in serum.

[0106] FIGS. 25A-25B depict the sequences for illustrative αMSLN x αCD3 bsAbs in the 1+1 Fab-scFv-Fc format and comprising a L1.47_H1.32 anti-CD3 scFv (a.k.a. CD3 High-Int#1[VLVH]). CDRs are underlined and slashes indicate the border(s) between the variable regions and other chain components (e.g. constant region and domain linkers). It should be noted that the αMSLN x αCD3 bsAbs can utilize variable region, Fc region, and constant domain sequences that are 90, 95, 98 and 99% identical (as defined herein), and/or contain from 1, 2, 3, 4, 5, 6, 7, 8, 9 or 10 amino acid substitutions. In addition, each sequence outlined herein can include or exclude the M428L/N434S variants in one or preferably both Fc domains, which results in longer half-life in serum.

[0107] FIG. 26 depict the sequences for illustrative αMSLN x αCD3 bsAbs in the 1+1 Fab-scFv-Fc format and comprising a H1.33_L1.47 anti-CD3 scFv (a.k.a. CD3 Intermediate[VHVL]). CDRs are underlined and slashes indicate the border(s) between the variable regions and other chain components (e.g. constant region and domain linkers). It should be noted that the αMSLN x αCD3 bsAbs can utilize variable region, Fc region, and constant domain sequences that are 90, 95, 98 and 99% identical (as defined herein), and/or contain from 1, 2, 3, 4, 5, 6, 7, 8, 9 or 10 amino acid substitutions. In addition, each sequence outlined herein can include or exclude the M428L/N434S variants in one or preferably both Fc domains, which results in longer half-life in serum.

[0108] FIG. 27 depicts the sequences for illustrative αMSLN x αCD3 bsAbs in the 1+1 Fab-scFv-Fc format and comprising a H1.31_L1.47 anti-CD3 scFv (a.k.a. CD3 Low[VHVL]). CDRs are underlined and slashes indicate the border(s) between the variable regions and other chain components (e.g. constant region and domain linkers). It should be noted that the αMSLN x αCD3 bsAbs can utilize variable region, Fc region, and constant domain sequences that are 90, 95, 98 and 99% identical (as defined herein), and/or contain from 1, 2, 3, 4, 5, 6, 7, 8, 9 or 10 amino acid substitutions. In addition, each sequence outlined herein can include or exclude the M428L/N434S variants in one or preferably both Fc domains, which results in longer half-life in serum.

[0109] FIGS. 28A-28B depict the sequences for illustrative αMSLN x αCD3 bsAbs in the 2+1 Fab₂-scFv-Fc format and comprising a H1.30_L1.47 anti-CD3 scFv (a.k.a. CD3 High[VHVL]). CDRs are underlined and slashes indicate the border(s) between the variable regions and other chain components (e.g. constant region and domain linkers). It should be noted that the αMSLN x αCD3 bsAbs can utilize variable region, Fc region, and constant domain sequences that are 90, 95, 98 and 99% identical (as defined herein), and/or contain from 1, 2, 3, 4, 5, 6, 7, 8, 9 or 10 amino acid substitutions. In addition, each sequence outlined herein can include or exclude the M428L/N434S variants in one or preferably both Fc domains, which results in longer half-life in serum.

[0110] FIGS. 29A-29B depict the sequences for illustrative αMSLN x αCD3 bsAbs in the 2+1 Fab₂-scFv-Fc format and comprising a L1.47_H1.30 anti-CD3 scFv (a.k.a. CD3 High[VLVH]). CDRs are underlined and slashes indicate the border(s) between the variable regions and other chain components (e.g. constant region and domain linkers). It should be noted that the αMSLN x αCD3 bsAbs can utilize variable region, Fc region, and constant domain sequences that are 90, 95, 98 and 99% identical (as defined herein), and/or contain from 1, 2, 3, 4, 5, 6, 7, 8, 9 or 10 amino acid substitutions. In addition, each sequence outlined herein can include or exclude the M428L/N434S variants in one or preferably both Fc domains, which results in longer half-life in serum.

[0111] FIGS. 30A-30E depict the sequences for illustrative αMSLN x αCD3 bsAbs in the 2+1 Fab₂-scFv-Fc format and comprising a H1.32_L1.47 anti-CD3 scFv (a.k.a. CD3 High-Int #1[VHVL]). CDRs are underlined and slashes indicate the border(s) between the variable regions and other chain components (e.g. constant region and domain linkers). It should be noted that the αMSLN x αCD3 bsAbs can utilize variable region, Fc region, and constant domain sequences that are 90, 95, 98 and 99% identical (as defined herein), and/or contain from 1, 2, 3, 4, 5, 6, 7, 8, 9 or 10 amino acid substitutions. In addition, each sequence outlined herein can include or exclude the M428L/N434S variants in one or preferably both Fc domains, which results in longer half-life in serum.

[0112] FIGS. 31A-31T depict the sequences for illustrative αMSLN x αCD3 bsAbs in the 2+1 Fab₂-scFv-Fc format and comprising a L1.47_H1.32 anti-CD3 scFv (a.k.a. CD3 High-Int #1[VLVH]). CDRs are underlined and slashes indicate the border(s) between the variable regions and other chain components (e.g. constant region and domain linkers). It should be noted that the αMSLN x αCD3 bsAbs can utilize variable region, Fc region, and constant domain sequences that are 90, 95, 98 and 99% identical (as defined herein), and/or contain from 1, 2, 3, 4, 5, 6, 7, 8, 9 or 10 amino acid substitutions. In addition, each sequence outlined herein can include or exclude the M428L/N434S variants in one or preferably both Fc domains, which results in longer half-life in serum.

[0113] FIGS. 32A-32P depict the sequences for illustrative αMSLN x αCD3 bsAbs in the 2+1 Fab₂-scFv-Fc format and comprising a L1.47_H1.89 anti-CD3 scFv (a.k.a. CD3 High-Int #2[VLVH]). CDRs are underlined and slashes indicate the border(s) between the variable regions and other chain components (e.g. constant region and domain linkers). It should be noted that the αMSLN x αCD3 bsAbs can utilize variable region, Fc region, and constant domain sequences that are 90, 95, 98 and 99% identical (as defined herein), and/or contain from 1, 2, 3, 4, 5, 6, 7, 8, 9 or 10 amino acid substitutions. In addition, each sequence outlined herein can include or exclude the M428L/N434S variants in one or preferably both Fc domains, which results in longer half-life in serum.

[0114] FIG. 33 depicts activation of CD4⁺ T cells, as indicated by A) CD107a degranulation, B) CD25 expression, and C) CD69 expression following incubation of T cells with Kuramochi cells and the indicated test articles. The data show that anti-MSLN x anti-CD3 bsAbs in the 2+1 Fab2-scFv-Fc format (XENP31063, XENP31064, XENP31067, and XENP31068) promoted activity of CD4+ T cells more potently than corresponding 1+1 Fab-scFv-Fc bsAbs (XENP16248, XENP30764, XENP16833, and XENP30765).

[0115] FIG. 34 depicts activation of CD8⁺ T cells, as indicated by A) CD107a degranulation, B) CD25 expression, and C) CD69 expression following incubation of T cells with Kuramochi cells and the indicated test articles. The data show that anti-MSLN x anti-CD3 bsAbs in the 2+1 Fab2-scFv-Fc format (XENP31063, XENP31064, XENP31067, and XENP31068) promoted activity of CD8+ T cells more potently than corresponding 1+1 Fab-scFv-Fc bsAbs (XENP16248, XENP30764, XENP16833, and XENP30765).

[0116] FIGS. 35A-35D depict the binding to OVCAR8 cells by A) XENP31697 vs. XENP31717 (both having 0.28 nM MSLN K_{D}), B) XENP32561 vs. XENP32745 (both having 0.45 nM MSLN K_{D}), C) XENP32562 vs. XENP32748 (both having 0.74 nM MSLN K_{D}), D) XENP32567 vs. XENP32852 vs. XENP32853 (each having 3.9 nM MSLN K_{D}), E) XENP32552 vs. XENP32947 (both having 9.2 nM MSLN K_{D}), F) XENP32937 vs. XENP32948 (both having 10.2 nM MSLN K_{D}), and G) XENP32751 vs. XENP32563 (both having 12.8 nM MSLN K_{D}). The data show that as the MSLN binding affinity is decreased, the 2+1 Fab₂-scFv-Fc format provides more potent binding to OVCAR8 cells than the 1+1 Fab-scFv-Fc format. Further, XENP32852 and XENP32853 which differ only in CD3 binding affinity have identical binding to OVCAR8 cells confirming that avid binding is due to the MSLN binding domain.

[0117] FIG. 36 depicts the RTCC on A549, HT29, MCF7, OVCAR8, and SKOV3 cells by A) XENP31717 (having 0.28 nM MSLN K_{D}), B) XENP32852 (having 3.9 nM MSLN K_{D}), C) XENP32948 (having 10.2 nM MSLN K_{D}), and D) XENP32947 (having 9.2 nM MSLN KD). The data show that at high MSLN binding affinity, the 2+1 bsAbs induced potent RTCC on MSLN^{high} OVCAR8 cell lines as well as MSLN^{low} SKOV3 and HT29 cell lines. As MSLN binding affinity is reduced, the RTCC potency of the 2+1 bsAbs on the MSLN^{low} cell lines is reduced.

[0118] FIG. 37 depicts induction of RTCC on luciferase-transfected cell lines with varying surface MSLN densities by A) XENP31717, B) XENP33366, and C) XENP33367. XENP33366 having 90.4 nM MSLN binding affinity enabled improved selectivity for MSLN^{high} OVCAR8, as indicated by reduced potency in killing of SKOV3 cells and more potent killing of OVCAR8. XENP33367 having 246 nM MSLN binding affinity demonstrated little to no RTCC activity on MSLN^{low} cells, but was also less potent on OVCAR8 than XENP33366.

[0119] FIG. 38 depicts induction of RTCC (as determined by Xcelligence) on cell lines with varying surface MSLN densities by A) XENP31717, B) XENP33366, and C) XENP33367. XENP33366 having 90.4 nM MSLN binding affinity enabled improved selectivity for MSLN^{high} OVCAR8, as indicated by reduced potency in killing of SKOV3 cells and more potent killing of OVCAR8. XENP33367 having 246 nM MSLN binding affinity demonstrated little to no RTCC activity on MSLN^{low} cells, but was also less potent on OVCAR8 than XENP33366. RTCC activity on ASPC-1, a cancer cell line with ˜36K surface MSLN expression and a lower cancer IHC score, was similar to RTCC activity on OVCAR8 cell.

[0120] FIG. 39 depicts induction of T cell proliferation (as indicated by percentage T cells expressing Ki67) by A) XENP31717, B) XENP33366, and C) XENP33367 in the presence of cell lines with varying surface MSLN densities. Each of the three bispecific antibodies enabled proliferation in the presence of Score 3 and Score 2 cell lines, but not in the presence of Score 1 cell lines.

[0121] FIG. 40 depicts induction of T cell proliferation (as indicated by percentage T cells expressing Ki67) by A) XENP31717, B) XENP33366, and C) XENP33367 in the presence of cell lines with varying surface MSLN densities. Reduction in MSLN binding affinity reduced T cell degranulation in the presence of Score 1 cell lines.

[0122] FIG. 41 depicts induction of T cell proliferation (as indicated by percentage T cells expressing Ki67) by A) XENP31717, B) XENP33366, and C) XENP33367 in the presence of cell lines with varying surface MSLN densities. Reduction in MSLN binding affinity reduced T cell activation in the presence of Score 1 cell lines.

[0123] FIG. 42 induction of RTCC on luciferase-transfected cell lines with varying surface MSLN densities by A) XENP31717, B) XENP32852, C) XENP32251, and D) XENP32853. The data show that bsAbs with lower CD3 binding affinity (e.g. CD3 High-Int#2) enabled enhanced selectivity for OVCAR8 (MSLN ^{high}) over bsAbs with higher CD3 binding affinity (e.g. CD3 High-Int#1).

[0124] FIGS. 43A-43K depict several formats for use in the anti-MSLN x anti-CD3 bispecific antibodies disclosed herein. The first is the “1+1 Fab-scFv-Fc” format (also referred to as the “bottle opener” or “Triple F” format), with a first antigen binding domain that is a Fab domain and a second anti-antigen binding domain that is an scFv domain. Additionally, “mAb-Fv,” “mAb-scFv,” “2+1 Fab2-scFv-Fc” (also referred to as the “central scFv” or “central-scFv” format”), “central-Fv,” “one armed central-scFv,” “one scFv-mAb,” “scFv-mAb,” “dual scFv,” “trident,” and non-heterodimeric bispecific formats are all shown. The scFv domains can be either, from N- to C-terminus orientation: variable heavy-(optional linker)-variable light, or variable light-(optional linker)-variable heavy. In addition, for the one armed scFv-mAb, the scFv can be attached either to the N-terminus of a heavy chain monomer or to the N-terminus of the light chain. In certain embodiments, “Anti-antigen 1” in FIGS. 43A-43K refers to a MSLN binding domain. In certain embodiments, “Anti-antigen 1” in FIGS. 43A-43K refers to a CD3 binding domain. In certain embodiments, “Anti-antigen 2” in FIGS. 43A-43K refers to a MSLN binding domain. In certain embodiments “Anti-antigen 2” in FIGS. 43A-43K refers to a CD3 binding domain. In some embodiments, “Anti-antigen 1” in FIGS. 43A-43K refers to a MSLN binding domain and “Anti-antigen 2” in FIGS. 43A-43K refers to a CD3 binding domain. In some embodiments, “Anti-antigen 1” in FIGS. 43A-43K refers to a CD3 binding domain and “Anti-antigen 2” in FIGS. 43A-43K refers to a MSLN binding domain. Any of the MSLN binding domains and CD3 binding domains disclosed can be included in the bispecific formats of FIGS. 43A-43K.

### DETAILED DESCRIPTION OF THE INVENTION

### I. Overview

[0125] Anti-bispecific antibodies that co-engage CD3 and a tumor antigen target are used to redirect T cells to attack and lyse targeted tumor cells. Examples include the BiTE® and DART formats, which monovalently engage CD3 and a tumor antigen. While the CD3-targeting approach has shown considerable promise, a common side effect of such therapies is the associated production of cytokines, often leading to toxic cytokine release syndrome. Because the anti-CD3 binding domain of the bispecific antibody engages all T cells, the high cytokine-producing CD4 T cell subset is recruited. Moreover, the CD4 T cell subset includes regulatory T cells, whose recruitment and expansion can potentially lead to immune suppression and have a negative impact on long-term tumor suppression. In addition, these formats do not contain Fc domains and show very short serum half-lives in patients.

[0126] Provided herein are novel anti-CD3 x anti-MSLN (also referred to as anti-MSLN x anti-CD3, αCD3 x αMSLN, or αMSLN x αCD3) heterodimeric bispecific antibodies and methods of using such antibodies for the treatment of cancers. In particular, provided herein are anti-CD3, anti-MSLN bispecific antibodies in a variety of formats such as those depicted in FIGS. 22A, 22B and 43A-43K. These bispecific antibodies are useful for the treatment of cancers, particularly those with increased MSLN expression such as ovarian cancer, colon cancer, breast cancer, hepatocellular carcinoma, lung cancer, mesothelioma, pancreatic cancer, non-small cell lung cancer (such as lung adenocarcinoma) and endometrial cancer. Such antibodies are used to direct CD3+ effector T cells to MSLN+ tumors, thereby allowing the CD3+ effector T cells to attack and lyse the MSLN+ tumors.

[0127] Additionally, in some embodiments, the disclosure provides bispecific antibodies that have different binding affinities to human CD3 that can alter or reduce the potential side effects of anti-CD3 therapy. That is, in some embodiments the antibodies described herein provide antibody constructs comprising anti-CD3 antigen binding domains that are “strong” or “high affinity” binders to CD3 (e.g. one example are heavy and light variable domains depicted as H1.30_L1.47 (optionally including a charged linker as appropriate)) and also bind to MSLN. In other embodiments, the antibodies described herein provide antibody constructs comprising anti-CD3 antigen binding domains that are “lite” or “lower affinity” binders to CD3. Additional embodiments provides antibody constructs comprising anti-CD3 antigen binding domains that have intermediate or “medium” affinity to CD3 that also bind to MSLN. While a very large number of anti-CD3 antigen binding domains (ABDs) can be used, particularly useful embodiments use 6 different anti-CD3 ABDs, although they can be used in two scFv orientations as discussed herein. Affinity is generally measured using a Biacore assay.

[0128] It should be appreciated that the “high, medium, low” anti-CD3 sequences provided herein can be used in a variety of heterodimerization formats as depicted in FIGS. 22A, 22B, and 43A-43K. In general, due to the potential side effects of T cell recruitment, exemplary embodiments utilize formats that only bind CD3 monovalently, such as depicted in FIGS. 22A and 22B, and in the formats depicted herein, it is the CD3 ABD that is a scFv as more fully described herein. In contrast, the subject bispecific antibodies can bind MSLN either monovalently (e.g. FIG. 22A) or bivalently (e.g. FIG. 22B).

[0129] Provided herein are compositions that include MSLN binding domains, including antibodies with such MSLN binding domains (e.g., MSLN x CD3 bispecific antibodies). Subject antibodies that include such MSLN binding domains advantageously elicit a range of different immune responses, depending on the particular MSLN binding domain used. For example, the subject antibodies exhibit differences in selectivity for cells with different MSLN expression, potencies for MSLN expressing cells, ability to elicit cytokine release, and sensitivity to soluble MSLN. Such MSLN binding domains and related antibodies find use, for example, in the treatment of MSLN associated cancers.

[0130] Accordingly, in one aspect, provided herein are heterodimeric antibodies that bind to two different antigens, e.g. the antibodies are “bispecific”, in that they bind two different target antigens, generally MSLN and CD3 as described herein. These heterodimeric antibodies can bind these target antigens either monovalently (e.g. there is a single antigen binding domain such as a variable heavy and variable light domain pair) or bivalently (there are two antigen binding domains that each independently bind the antigen). In some embodiments, the heterodimeric antibody provided herein includes one CD3 binding domain and one MSLN binding domain (e.g., heterodimeric antibodies in the “1+1 Fab-scFv-Fc” format described herein). In other embodiments, the heterodimeric antibody provided herein includes one CD3 binding domain and two MSLN binding domains (e.g., heterodimeric antibodies in the “2+1 Fab2-scFv-Fc” formats described herein). The heterodimeric antibodies provided herein are based on the use different monomers which contain amino acid substitutions that “skew” formation of heterodimers over homodimers, as is more fully outlined below, coupled with “pI variants” that allow simple purification of the heterodimers away from the homodimers, as is similarly outlined below. The heterodimeric bispecific antibodies provided generally rely on the use of engineered or variant Fc domains that can self-assemble in production cells to produce heterodimeric proteins, and methods to generate and purify such heterodimeric proteins.

### II. Nomenclature

[0131] The antibodies provided herein are listed in several different formats. In some instances, each monomer of a particular antibody is given a unique “XENP” number, although as will be appreciated in the art, a longer sequence might contain a shorter one. For example, a “scFv-Fc” monomer of a 1+1 Fab-scFv-Fc format antibody may have a first XENP number, while the scFv domain itself will have a different XENP number. Some molecules have three polypeptides, so the XENP number, with the components, is used as a name. Thus, the molecule XENP31063, which is in 2+1 Fab₂-scFv-Fc format, comprises three sequences (see FIG. 28A) a “Fab-Fc Heavy Chain” monomer; 2) a “Fab-scFv-Fc Heavy Chain” monomer; and 3) a “Light Chain” monomer or equivalents, although one of skill in the art would be able to identify these easily through sequence alignment. These XENP numbers are in the sequence listing as well as identifiers, and used in the Figures. In addition, one molecule, comprising the three components, gives rise to multiple sequence identifiers. For example, the listing of the Fab includes, the full heavy chain sequence, the variable heavy domain sequence and the three CDRs of the variable heavy domain sequence, the full light chain sequence, a variable light domain sequence and the three CDRs of the variable light domain sequence. A Fab-scFv-Fc monomer includes a full length sequence, a variable heavy domain sequence, 3 heavy CDR sequences, and an scFv sequence (include scFv variable heavy domain sequence, scFv variable light domain sequence and scFv linker). Note that some molecules herein with a scFv domain use a single charged scFv linker (+H), although others can be used. In addition, the naming nomenclature of particular antigen binding domains (e.g., MSLN and CD3 binding domains) use a “Hx.xx_Ly.yy” type of format, with the numbers being unique identifiers to particular variable chain sequences. Thus, the variable domain of the Fab side of MSLN binding domain MESO-C[MSLN]_H1L1 (e.g., FIG. 17) is “H1 L1”, which indicates that the variable heavy domain, H1, was combined with the light domain L1. In the case that these sequences are used as scFvs, the designation “H1 L1”, indicates that the variable heavy domain, H1 is combined with the light domain, L1, and is in VH-linker-VL orientation, from N- to C-terminus. This molecule with the identical sequences of the heavy and light variable domains but in the reverse order (VL-linker-VH orientation, from N- to C-terminus) would be designated “L1_H1.1”. Similarly, different constructs may “mix and match” the heavy and light chains as will be evident from the sequence listing and the figures.

### III. Definitions

[0132] In order that the application may be more completely understood, several definitions are set forth below. Such definitions are meant to encompass grammatical equivalents.

[0133] By “MSLN” or “Mesothelin” or “MESO” (e.g., FIG. 14A-14B) herein is meant a protein belonging to a series of ectoenzymes that are involved in hydrolysis of extracellular nucleotides. MSLN sequences are depicted, for example, in FIGS. 14A and 14B. MSLN is expressed in particular cancers, including ovarian cancer, colon cancer, breast cancer, hepatocellular carcinoma, lung cancer, mesothelioma, pancreatic cancer, non-small cell lung cancer (such as lung adenocarcinoma) and endometrial cancer.

[0134] By “ablation” herein is meant a decrease or removal of activity. Thus for example, “ablating FcγR binding” means the Fc region amino acid variant has less than 50% starting binding as compared to an Fc region not containing the specific variant, with more than 70-80-90-95-98% loss of activity being preferred, and in general, with the activity being below the level of detectable binding in a Biacore, SPR or BLI assay. Of particular use in the ablation of FcγR binding are those shown in FIG. 5, which generally are added to both monomers.

[0135] By “ADCC” or “antibody dependent cell-mediated cytotoxicity” as used herein is meant the cell-mediated reaction wherein nonspecific cytotoxic cells that express FcγRs recognize bound antibody on a target cell and subsequently cause lysis of the target cell. ADCC is correlated with binding to FcγRIIIa; increased binding to FcγRIIIa leads to an increase in ADCC activity.

[0136] By “ADCP” or antibody dependent cell-mediated phagocytosis as used herein is meant the cell-mediated reaction wherein nonspecific phagocytic cells that express FcγRs recognize bound antibody on a target cell and subsequently cause phagocytosis of the target cell.

[0137] As used herein, term “antibody” is used generally. Antibodies described herein can take on a number of formats as described herein, including traditional antibodies as well as antibody derivatives, fragments and mimetics, described herein.

[0138] Traditional immunoglobulin (Ig) antibodies are “Y” shaped tetramers. Each tetramer is typically composed of two identical pairs of polypeptide chains, each pair having one “light chain” monomer (typically having a molecular weight of about 25 kDa) and one “heavy chain” monomer (typically having a molecular weight of about 50-70 kDa).

[0139] Other useful antibody formats include, but are not limited to, the 1+1 Fab-scFv-Fc format and 2+1 Fab-scFv-Fc antibody formats described herein, as well as “mAb-Fv,” “mAb-scFv,” “central-Fv”, “one armed scFv-mAb,” “scFv-mAb,” “dual scFv,” and “trident” format antibodies, as shown in FIG. 43A-43K.

[0140] Antibody heavy chains typically include a variable heavy (VH) domain, which includes vhCDR1-3, and an Fc domain, which includes a CH2-CH3 monomer. In some embodiments, antibody heavy chains include a hinge and CH1 domain. Traditional antibody heavy chains are monomers that are organized, from N- to C-terminus: VH-CH1-hinge-CH2-CH3. The CH1-hinge-CH2-CH3 is collectively referred to as the heavy chain “constant domain” or “constant region” of the antibody, of which there are five different categories or “isotypes”: IgA, IgD, IgG, IgE and IgM. Thus, “isotype” as used herein is meant any of the subclasses of immunoglobulins defined by the chemical and antigenic characteristics of their constant regions. It should be understood that therapeutic antibodies can also comprise hybrids of isotypes and/or subclasses. For example, as shown in US Publication 2009/0163699, incorporated by reference, the antibodies described herein include the use of human IgG1/G2 hybrids.

[0141] In some embodiments, the antibodies provided herein include IgG isotype constant domains, which has several subclasses, including, but not limited to IgG1, IgG2, IgG3, and IgG4. In the IgG subclass of immunoglobulins, there are several immunoglobulin domains in the heavy chain. By “immunoglobulin (Ig) domain” herein is meant a region of an immunoglobulin having a distinct tertiary structure. Of interest in the antibodies described herein are the heavy chain domains, including, the constant heavy (CH) domains and the hinge domains. In the context of IgG antibodies, the IgG isotypes each have three CH regions. Accordingly, “CH” domains in the context of IgG are as follows: “CH1” refers to positions 118-220 according to the EU index as in Kabat. “CH2” refers to positions 237-340 according to the EU index as in Kabat, and “CH3” refers to positions 341-447 according to the EU index as in Kabat. As shown herein and described below, the pI variants can be in one or more of the CH regions, as well as the hinge region, discussed below.

[0142] It should be noted that IgG1 has different allotypes with polymorphisms at 356 (D or E) and 358 (L or M). The sequences depicted herein use the 356D/358M allotype, however the other allotype is included herein. That is, any sequence inclusive of an IgG1 Fc domain included herein can have 356E/358L replacing the 356D/358M allotype. It should be understood that therapeutic antibodies can also comprise hybrids of isotypes and/or subclasses. For example, as shown in US Publication 2009/0163699, incorporated by reference, the present antibodies, in some embodiments, include IgG1/IgG2 hybrids.

[0143] By “Fc” or “Fc region” or “Fc domain” as used herein is meant the polypeptide comprising the constant region of an antibody, in some instances, excluding all of the first constant region immunoglobulin domain (e.g., CH1) or a portion thereof, and in some cases, optionally including all or part of the hinge. For IgG, the Fc domain comprises immunoglobulin domains CH2 and CH3 (Cγ2 and Cγ3), and optionally all or a portion of the hinge region between CH1 (Cγ1) and CH2 (Cγ2). Thus, in some cases, the Fc domain includes, from N- to C-terminal, CH2-CH3 and hinge-CH2-CH3. In some embodiments, the Fc domain is that from IgG1, IgG2, IgG3 or IgG4, with IgG1 hinge-CH2-CH3 and IgG4 hinge-CH2-CH3 finding particular use in many embodiments. Additionally, in the case of human IgG1 Fc domains, frequently the hinge includes a C220S amino acid substitution. Furthermore, in the case of human IgG4 Fc domains, frequently the hinge includes a S228P amino acid substitution. Although the boundaries of the Fc region may vary, the human IgG heavy chain Fc region is usually defined to include residues E216, C226, or A231 to its carboxyl-terminal, wherein the numbering is according to the EU index as in Kabat. In some embodiments, as is more fully described below, amino acid modifications are made to the Fc region, for example to alter binding to one or more FcγR or to the FcRn.

[0144] By “heavy chain constant region” herein is meant the CH1-hinge-CH2-CH3 portion of an antibody (or fragments thereof), excluding the variable heavy domain; in EU numbering of human IgG1 this is amino acids 118-447 By “heavy chain constant region fragment” herein is meant a heavy chain constant region that contains fewer amino acids from either or both of the N- and C-termini but still retains the ability to form a dimer with another heavy chain constant region.

[0145] Another type of Ig domain of the heavy chain is the hinge region. By “hinge” or “hinge region” or “antibody hinge region” or “hinge domain” herein is meant the flexible polypeptide comprising the amino acids between the first and second constant domains of an antibody. Structurally, the IgG CH1 domain ends at EU position 215, and the IgG CH2 domain begins at residue EU position 231. Thus for IgG the antibody hinge is herein defined to include positions 216 (E216 in IgG1) to 230 (p230 in IgG1), wherein the numbering is according to the EU index as in Kabat. In some cases, a “hinge fragment” is used, which contains fewer amino acids at either or both of the N- and C-termini of the hinge domain. As noted herein, pI variants can be made in the hinge region as well. Many of the antibodies herein have at least one the cysteines at position 220 according to EU numbering (hinge region) replaced by a serine. Generally, this modification is on the “scFv monomer” side for most of the sequences depicted herein, although it can also be on the “Fab monomer” side, or both, to reduce disulfide formation. Specifically included within the sequences herein are one or both of these cysteines replaced (C220S).

[0146] As will be appreciated by those in the art, the exact numbering and placement of the heavy constant region domains can be different among different numbering systems. A useful comparison of heavy constant region numbering according to EU and Kabat is as below, see Edelman et al., 1969, Proc Natl Acad Sci USA 63:78-85 and Kabat et al., 1991, Sequences of Proteins of Immunological Interest, 5th Ed., United States Public Health Service, National Institutes of Health, Bethesda, entirely incorporated by reference.

TABLE 1

| | EU Numbering | Kabat Numbering |
|---|---|---|
| CH1 | 118-215 | 114-223 |
| Hinge | 216-230 | 226-243 |
| CH2 | 231-340 | 244-360 |
| CH3 | 341-447 | 361-478 |

[0147] The antibody light chain generally comprises two domains: the variable light domain (VL), which includes light chain CDRs vlCDR1-3, and a constant light chain region (often referred to as CL or Cκ). The antibody light chain is typically organized from N- to C-terminus: VL-CL.

[0148] By “antigen binding domain” or “ABD” herein is meant a set of six Complementary Determining Regions (CDRs) that, when present as part of a polypeptide sequence, specifically binds a target antigen (e.g., MSLN or CD3) as discussed herein. As is known in the art, these CDRs are generally present as a first set of variable heavy CDRs (vhCDRs or VHCDRs) and a second set of variable light CDRs (vlCDRs or VLCDRs), each comprising three CDRs: vhCDR1, vhCDR2, vhCDR3 variable heavy CDRs and vlCDR1, vlCDR2 and vlCDR3 vhCDR3 variable light CDRs. The CDRs are present in the variable heavy domain (vhCDR1-3) and variable light domain (vlCDR1-3). The variable heavy domain and variable light domain from an Fv region.

[0149] The antibodies described herein provide a large number of different CDR sets. In this case, a “full CDR set” comprises the three variable light and three variable heavy CDRs, e.g., a vlCDR1, vlCDR2, vlCDR3, vhCDR1, vhCDR2 and vhCDR3. These can be part of a larger variable light or variable heavy domain, respectfully. In addition, as more fully outlined herein, the variable heavy and variable light domains can be on separate polypeptide chains, when a heavy and light chain is used (for example when Fabs are used), or on a single polypeptide chain in the case of scFv sequences.

[0150] As will be appreciated by those in the art, the exact numbering and placement of the CDRs can be different among different numbering systems. However, it should be understood that the disclosure of a variable heavy and/or variable light sequence includes the disclosure of the associated (inherent) CDRs. Accordingly, the disclosure of each variable heavy region is a disclosure of the vhCDRs (e.g., vhCDR1, vhCDR2 and vhCDR3) and the disclosure of each variable light region is a disclosure of the vlCDRs (e.g., vlCDR1, vlCDR2 and vlCDR3). A useful comparison of CDR numbering is as below, see Lafranc et al., Dev. Comp. Immunol. 27(1):55-77 (2003):

TABLE 2

| | Kabat + | | | | | | |
|---|---|---|---|---|---|---|---|
| | Chothia | IMGT | Rabat | AbM | Chothia | Contact | Xencor |
| vhCDR1 | 26-35 | 27-38 | 31-35 | 26-35 | 26-32 | 30-35 | 27-35 |
| vhCDR2 | 50-65 | 56-65 | 50-65 | 50-58 | 52-56 | 47-58 | 54-61 |
| vhCDR3 | 95-102 | 105-117 | 95-102 | 95-102 | 95-102 | 93-101 | 103-116 |
| vlCDR1 | 24-34 | 27-38 | 24-34 | 24-34 | 24-34 | 30-36 | 27-38 |
| vlCDR2 | 50-56 | 56-65 | 50-56 | 50-56 | 50-56 | 46-55 | 56-62 |
| vlCDR3 | 89-97 | 105-117 | 89-97 | 89-97 | 89-97 | 89-96 | 97-105 |

[0151] Throughout the present specification, the Kabat numbering system is generally used when referring to a residue in the variable domain (approximately, residues 1-107 of the light chain variable region and residues 1-113 of the heavy chain variable region) and the EU numbering system for Fc regions (e.g., Kabat et al., supra (1991)).

[0152] The CDRs contribute to the formation of the antigen-binding, or more specifically, epitope binding site of the antigen binding domains and antibodies. “Epitope” refers to a determinant that interacts with a specific antigen binding site in the variable region of an antibody molecule known as a paratope. Epitopes are groupings of molecules such as amino acids or sugar side chains and usually have specific structural characteristics, as well as specific charge characteristics. A single antigen may have more than one epitope.

[0153] The epitope may comprise amino acid residues directly involved in the binding (also called immunodominant component of the epitope) and other amino acid residues, which are not directly involved in the binding, such as amino acid residues which are effectively blocked by the specifically antigen binding peptide; in other words, the amino acid residue is within the footprint of the specifically antigen binding peptide.

[0154] Epitopes may be either conformational or linear. A conformational epitope is produced by spatially juxtaposed amino acids from different segments of the linear polypeptide chain. A linear epitope is one produced by adjacent amino acid residues in a polypeptide chain. Conformational and nonconformational epitopes may be distinguished in that the binding to the former but not the latter is lost in the presence of denaturing solvents.

[0155] An epitope typically includes at least 3, and more usually, at least 5 or 8-10 amino acids in a unique spatial conformation. Antibodies that recognize the same epitope can be verified in a simple immunoassay showing the ability of one antibody to block the binding of another antibody to a target antigen, for example “binning.” As outlined below, the disclosure not only includes the enumerated antigen binding domains and antibodies herein, but those that compete for binding with the epitopes bound by the enumerated antigen binding domains.

[0156] In some embodiments, the six CDRs of the antigen binding domain are contributed by a variable heavy and a variable light domain. In a “Fab” format, the set of 6 CDRs are contributed by two different polypeptide sequences, the variable heavy domain (vh or VH; containing the vhCDR1, vhCDR2 and vhCDR3) and the variable light domain (vl or VL; containing the vlCDR1, vlCDR2 and vlCDR3), with the C-terminus of the vh domain being attached to the N-terminus of the CH1 domain of the heavy chain and the C-terminus of the vl domain being attached to the N-terminus of the constant light domain (and thus forming the light chain). In a scFv format, the vh and vl domains are covalently attached, generally through the use of a linker (a “scFv linker”) as outlined herein, into a single polypeptide sequence, which can be either (starting from the N-terminus) vh-linker-vl or vl-linker-vh, with the former being generally preferred (including optional domain linkers on each side, depending on the format used (e.g., from FIG. 1). In general, the C-terminus of the scFv domain is attached to the N-terminus of the hinge in the second monomer.

[0157] By “variable region” or “variable domain” as used herein is meant the region of an immunoglobulin that comprises one or more Ig domains substantially encoded by any of the Vκ, Vλ, and/or VH genes that make up the kappa, lambda, and heavy chain immunoglobulin genetic loci respectively, and contains the CDRs that confer antigen specificity. Thus, a “variable heavy domain” pairs with a “variable light domain” to form an antigen binding domain (“ABD”). In addition, each variable domain comprises three hypervariable regions (“complementary determining regions,” “CDRs”) (VHCDR1, VHCDR2 and VHCDR3 for the variable heavy domain and VLCDR1, VLCDR2 and VLCDR3 for the variable light domain) and four framework (FR) regions, arranged from amino-terminus to carboxy-terminus in the following order: FR1-CDR1-FR2-CDR2-FR3-CDR3-FR4. The hypervariable region generally encompasses amino acid residues from about amino acid residues 24-34 (LCDR1; “L” denotes light chain), 50-56 (LCDR2) and 89-97 (LCDR3) in the light chain variable region and around about 31-35B (HCDR1; “H” denotes heavy chain), 50-65 (HCDR2), and 95-102 (HCDR3) in the heavy chain variable region; Kabat et al., SEQUENCES OF PROTEINS OF IMMUNOLOGICAL INTEREST, 5th Ed. Public Health Service, National Institutes of Health, Bethesda, Md. (1991) and/or those residues forming a hypervariable loop (e.g. residues 26-32 (LCDR1), 50-52 (LCDR2) and 91-96 (LCDR3) in the light chain variable region and 26-32 (HCDR1), 53-55 (HCDR2) and 96-101 (HCDR3) in the heavy chain variable region; Chothia and Lesk (1987) J. Mol. Biol. 196:901-917. Specific CDRs of the invention are described in Table 2.

[0158] By “Fab” or “Fab region” as used herein is meant the polypeptide that comprises the VH, CH1, VL, and CL immunoglobulin domains, generally on two different polypeptide chains (e.g. VH-CH1 on one chain and VL-CL on the other). Fab may refer to this region in isolation, or this region in the context of a bispecific antibody described herein. In the context of a Fab, the Fab comprises an Fv region in addition to the CH1 and CL domains.

[0159] By “Fv” or “Fv fragment” or “Fv region” as used herein is meant a polypeptide that comprises the VL and VH domains of an ABD. Fv regions can be formatted as both Fabs (as discussed above, generally two different polypeptides that also include the constant regions as outlined above) and scFvs, where the VL and VH domains are combined (generally with a linker as discussed herein) to form an scFv.

[0160] By “single chain Fv” or “scFv” herein is meant a variable heavy domain covalently attached to a variable light domain, generally using a scFv linker as discussed herein, to form a scFv or scFv domain. A scFv domain can be in either orientation from N- to C-terminus (VH-linker-VL or VL-linker-VH). In the sequences depicted in the sequence listing and in the figures, the order of the VH and VL domain is indicated in the name, e.g. H.X_L.Y means N- to C-terminal is VH-linker-VL, and L.Y_H.X is VL-linker-VH.

[0161] Some embodiments of the subject antibodies provided herein comprise at least one scFv domain, which, while not naturally occurring, generally includes a variable heavy domain and a variable light domain, linked together by a scFv linker. As outlined herein, while the scFv domain is generally from N- to C-terminus oriented as VH-scFv linker-VL, this can be reversed for any of the scFv domains (or those constructed using vh and vl sequences from Fabs), to VL-scFv linker-VH, with optional linkers at one or both ends depending on the format.

[0162] By “modification” herein is meant an amino acid substitution, insertion, and/or deletion in a polypeptide sequence or an alteration to a moiety chemically linked to a protein. For example, a modification may be an altered carbohydrate or PEG structure attached to a protein. By “amino acid modification” herein is meant an amino acid substitution, insertion, and/or deletion in a polypeptide sequence. For clarity, unless otherwise noted, the amino acid modification is always to an amino acid coded for by DNA, e.g. the 20 amino acids that have codons in DNA and RNA.

[0163] By “amino acid substitution” or “substitution” herein is meant the replacement of an amino acid at a particular position in a parent polypeptide sequence with a different amino acid. In particular, in some embodiments, the substitution is to an amino acid that is not naturally occurring at the particular position, either not naturally occurring within the organism or in any organism. For example, the substitution E272Y refers to a variant polypeptide, in this case an Fc variant, in which the glutamic acid at position 272 is replaced with tyrosine. For clarity, a protein which has been engineered to change the nucleic acid coding sequence but not change the starting amino acid (for example exchanging CGG (encoding arginine) to CGA (still encoding arginine) to increase host organism expression levels) is not an “amino acid substitution”; that is, despite the creation of a new gene encoding the same protein, if the protein has the same amino acid at the particular position that it started with, it is not an amino acid substitution.

[0164] By “amino acid insertion” or “insertion” as used herein is meant the addition of an amino acid sequence at a particular position in a parent polypeptide sequence. For example, −233E or 233E designates an insertion of glutamic acid after position 233 and before position 234. Additionally, −233ADE or A233ADE designates an insertion of AlaAspGlu after position 233 and before position 234.

[0165] By “amino acid deletion” or “deletion” as used herein is meant the removal of an amino acid sequence at a particular position in a parent polypeptide sequence. For example, E233- or E233#, E233( ) or E233del designates a deletion of glutamic acid at position 233. Additionally, EDA233- or EDA233# designates a deletion of the sequence GluAspAla that begins at position 233.

[0166] By “variant protein” or “protein variant”, or “variant” as used herein is meant a protein that differs from that of a parent protein by virtue of at least one amino acid modification. The protein variant has at least one amino acid modification compared to the parent protein, yet not so many that the variant protein will not align with the parental protein using an alignment program such as that described below. In general, variant proteins (such as variant Fc domains, etc., outlined herein, are generally at least 75, 80, 85, 90, 91, 92, 93, 94, 95, 96, 97, 98 or 99% identical to the parent protein, using the alignment programs described below, such as BLAST. “Variant” as used herein also refers to particular amino acid modifications that confer particular function (e.g., a “heterodimerization variant,” “pI variant,” “ablation variant,” etc.).

[0167] As described below, in some embodiments the parent polypeptide, for example an Fc parent polypeptide, is a human wild type sequence, such as the heavy constant domain or Fc region from IgG1, IgG2, IgG3 or IgG4, although human sequences with variants can also serve as “parent polypeptides”, for example the IgG1/2 hybrid of US Publication 2006/0134105 can be included. The protein variant sequence herein will preferably possess at least about 80% identity with a parent protein sequence, and most preferably at least about 90% identity, more preferably at least about 95-98-99% identity. Accordingly, by “antibody variant” or “variant antibody” as used herein is meant an antibody that differs from a parent antibody by virtue of at least one amino acid modification, “IgG variant” or “variant IgG” as used herein is meant an antibody that differs from a parent IgG (again, in many cases, from a human IgG sequence) by virtue of at least one amino acid modification, and “immunoglobulin variant” or “variant immunoglobulin” as used herein is meant an immunoglobulin sequence that differs from that of a parent immunoglobulin sequence by virtue of at least one amino acid modification. “Fc variant” or “variant Fc” as used herein is meant a protein comprising an amino acid modification in an Fc domain as compared to an Fc domain of human IgG1, IgG2 or IgG4.

[0168] “Fc variant” or “variant Fc” as used herein is meant a protein comprising an amino acid modification in an Fc domain. The modification can be an addition, deletion, or substitution. The Fc variants are defined according to the amino acid modifications that compose them. Thus, for example, N434S or 434S is an Fc variant with the substitution for serine at position 434 relative to the parent Fc polypeptide, wherein the numbering is according to the EU index. Likewise, M428L/N434S defines an Fc variant with the substitutions M428L and N434S relative to the parent Fc polypeptide. The identity of the WT amino acid may be unspecified, in which case the aforementioned variant is referred to as 428L/434S. It is noted that the order in which substitutions are provided is arbitrary, that is to say that, for example, 428L/434S is the same Fc variant as 434S/428L, and so on. For all positions discussed herein that relate to antibodies or derivatives and fragments thereof (e.g., Fc domains), unless otherwise noted, amino acid position numbering is according to the EU index. The “EU index” or “EU index as in Kabat” or “EU numbering” scheme refers to the numbering of the EU antibody (Edelman et al., 1969, Proc Natl Acad Sci USA 63:78-85, hereby entirely incorporated by reference).

[0169] In general, variant Fc domains have at least about 80, 85, 90, 95, 97, 98 or 99 percent identity to the corresponding parental human IgG Fc domain (using the identity algorithms discussed below, with one embodiment utilizing the BLAST algorithm as is known in the art, using default parameters). Alternatively, the variant Fc domains can have from 1, 2, 3, 4, 5, 6, 7, 8, 9, 10, 11,12, 13, 14, 15, 16, 11, 12, 13, 14, 15, 16, 17, 18, 19 or 20 amino acid modifications as compared to the parental Fc domain. Alternatively, the variant Fc domains can have up to 1, 2, 3, 4, 5, 6, 7, 8, 9, 10, 11,12, 13, 14, 15, 16, 11, 12, 13, 14, 15, 16, 17, 18, 19 or 20 amino acid modifications as compared to the parental Fc domain. Additionally, as discussed herein, the variant Fc domains described herein still retain the ability to form a dimer with another Fc domain as measured using known techniques as described herein, such as non-denaturing gel electrophoresis.

[0170] By “protein” herein is meant at least two covalently attached amino acids, which includes proteins, polypeptides, oligopeptides and peptides. In addition, polypeptides that make up the antibodies described herein may include synthetic derivatization of one or more side chains or termini, glycosylation, PEGylation, circular permutation, cyclization, linkers to other molecules, fusion to proteins or protein domains, and addition of peptide tags or labels.

[0171] By “residue” as used herein is meant a position in a protein and its associated amino acid identity. For example, Asparagine 297 (also referred to as Asn297 or N297) is a residue at position 297 in the human antibody IgG1.

[0172] By “IgG subclass modification” or “isotype modification” as used herein is meant an amino acid modification that converts one amino acid of one IgG isotype to the corresponding amino acid in a different, aligned IgG isotype. For example, because IgG1 comprises a tyrosine and IgG2 a phenylalanine at EU position 296, a F296Y substitution in IgG2 is considered an IgG subclass modification.

[0173] By “non-naturally occurring modification” as used herein is meant an amino acid modification that is not isotypic. For example, because none of the human IgGs comprise a serine at position 434, the substitution 434S in IgG1, IgG2, IgG3, or IgG4 (or hybrids thereof) is considered a non-naturally occurring modification.

[0174] By “amino acid” and “amino acid identity” as used herein is meant one of the 20 naturally occurring amino acids that are coded for by DNA and RNA.

[0175] By “effector function” as used herein is meant a biochemical event that results from the interaction of an antibody Fc region with an Fc receptor or ligand. Effector functions include but are not limited to ADCC, ADCP, and CDC.

[0176] By “IgG Fc ligand” as used herein is meant a molecule, preferably a polypeptide, from any organism that binds to the Fc region of an IgG antibody to form an Fc/Fc ligand complex. Fc ligands include but are not limited to FcγRIs, FcγRIIs, FcγRIIIs, FcRn, C1q, C3, mannan binding lectin, mannose receptor, staphylococcal protein A, streptococcal protein G, and viral FcγR. Fc ligands also include Fc receptor homologs (FcRH), which are a family of Fc receptors that are homologous to the FcγRs (Davis et al., 2002, Immunological Reviews 190:123-136, entirely incorporated by reference). Fc ligands may include undiscovered molecules that bind Fc. Particular IgG Fc ligands are FcRn and Fc gamma receptors. By “Fc ligand” as used herein is meant a molecule, preferably a polypeptide, from any organism that binds to the Fc region of an antibody to form an Fc/Fc ligand complex.

[0177] By “Fc gamma receptor”, “FcγR” or “FcgammaR” as used herein is meant any member of the family of proteins that bind the IgG antibody Fc region and is encoded by an FcγR gene. In humans this family includes but is not limited to FcγRI (CD64), including isoforms FcγRIa, FcγRIb, and FcγRIc; FcγRII (CD32), including isoforms FcγRIIa (including allotypes H131 and R131), FcγRIIb (including FcγRIIb-1 and FcγRIIb-2), and FcγRIIc; and FcγRIII (CD16), including isoforms FcγRIIIa (including allotypes V158 and F158) and FcγRIIIb (including allotypes FcγRIIb-NA1 and FcγRIIb-NA2) (Jefferis et al., 2002, Immunol Lett 82:57-65, entirely incorporated by reference), as well as any undiscovered human FcγRs or FcγR isoforms or allotypes. An FcγR may be from any organism, including but not limited to humans, mice, rats, rabbits, and monkeys. Mouse FcγRs include but are not limited to FcγRI (CD64), FcγRII (CD32), FcγRIII (CD16), and FcγRIII-2 (CD16-2), as well as any undiscovered mouse FcγRs or FcγR isoforms or allotypes.

[0178] By “FcRn” or “neonatal Fc Receptor” as used herein is meant a protein that binds the IgG antibody Fc region and is encoded at least in part by an FcRn gene. The FcRn may be from any organism, including but not limited to humans, mice, rats, rabbits, and monkeys. As is known in the art, the functional FcRn protein comprises two polypeptides, often referred to as the heavy chain and light chain. The light chain is beta-2-microglobulin and the heavy chain is encoded by the FcRn gene. Unless otherwise noted herein, FcRn or an FcRn protein refers to the complex of FcRn heavy chain with beta-2-microglobulin. A variety of FcRn variants used to increase binding to the FcRn receptor, and in some cases, to increase serum half-life. An “FcRn variant” is one that increases binding to the FcRn receptor, and suitable FcRn variants are shown below.

[0179] By “parent polypeptide” as used herein is meant a starting polypeptide that is subsequently modified to generate a variant. The parent polypeptide may be a naturally occurring polypeptide, or a variant or engineered version of a naturally occurring polypeptide. Accordingly, by “parent immunoglobulin” as used herein is meant an unmodified immunoglobulin polypeptide that is modified to generate a variant, and by “parent antibody” as used herein is meant an unmodified antibody that is modified to generate a variant antibody. It should be noted that “parent antibody” includes known commercial, recombinantly produced antibodies as outlined below. In this context, a “parent Fc domain” will be relative to the recited variant; thus, a “variant human IgG1 Fc domain” is compared to the parent Fc domain of human IgG1, a “variant human IgG4 Fc domain” is compared to the parent Fc domain human IgG4, etc.

[0180] By “position” as used herein is meant a location in the sequence of a protein. Positions may be numbered sequentially, or according to an established format, for example the EU index for antibody numbering.

[0181] By “target antigen” as used herein is meant the molecule that is bound specifically by the antigen binding domain comprising the variable regions of a given antibody.

[0182] By “strandedness” in the context of the monomers of the heterodimeric antibodies described herein is meant that, similar to the two strands of DNA that “match”, heterodimerization variants are incorporated into each monomer so as to preserve the ability to “match” to form heterodimers. For example, if some pI variants are engineered into monomer A (e.g. making the pI higher) then steric variants that are “charge pairs” that can be utilized as well do not interfere with the pI variants, e.g. the charge variants that make a pI higher are put on the same “strand” or “monomer” to preserve both functionalities. Similarly, for “skew” variants that come in pairs of a set as more fully outlined below, the skilled artisan will consider pI in deciding into which strand or monomer one set of the pair will go, such that pI separation is maximized using the pI of the skews as well.

[0183] By “target cell” as used herein is meant a cell that expresses a target antigen.

[0184] By “host cell” in the context of producing a bispecific antibody according to the antibodies described herein is meant a cell that contains the exogeneous nucleic acids encoding the components of the bispecific antibody and is capable of expressing the bispecific antibody under suitable conditions. Suitable host cells are discussed below.

[0185] By “wild type or WT” herein is meant an amino acid sequence or a nucleotide sequence that is found in nature, including allelic variations. A WT protein has an amino acid sequence or a nucleotide sequence that has not been intentionally modified.

[0186] Provided herein are a number of antibody domains that have sequence identity to human antibody domains. Sequence identity between two similar sequences (e.g., antibody variable domains) can be measured by algorithms such as that of Smith, T. F. & Waterman, M. S. (1981) “Comparison Of Biosequences,” Adv. Appl. Math. 2:482 [local homology algorithm]; Needleman, S. B. & Wunsch, C D. (1970) “A General Method Applicable To The Search For Similarities In The Amino Acid Sequence Of Two Proteins,” J. Mol. Biol. 48:443 [homology alignment algorithm], Pearson, W. R. & Lipman, D. J. (1988) “Improved Tools For Biological Sequence Comparison,” Proc. Natl. Acad. Sci. (U.S.A.) 85:2444 [search for similarity method]; or Altschul, S. F. et al, (1990) “Basic Local Alignment Search Tool,” J. Mol. Biol. 215:403-10, the “BLAST” algorithm, see https://blast.ncbi.nlm.nih.gov/Blast.cgi. When using any of the aforementioned algorithms, the default parameters (for Window length, gap penalty, etc) are used. In one embodiment, sequence identity is done using the BLAST algorithm, using default parameters

[0187] The antibodies described herein are generally isolated or recombinant. “Isolated,” when used to describe the various polypeptides disclosed herein, means a polypeptide that has been identified and separated and/or recovered from a cell or cell culture from which it was expressed. Ordinarily, an isolated polypeptide will be prepared by at least one purification step. An “isolated antibody,” refers to an antibody which is substantially free of other antibodies having different antigenic specificities. “Recombinant” means the antibodies are generated using recombinant nucleic acid techniques in exogeneous host cells, and they can be isolated as well.

[0188] “Specific binding” or “specifically binds to” or is “specific for” a particular antigen or an epitope means binding that is measurably different from a non-specific interaction. Specific binding can be measured, for example, by determining binding of a molecule compared to binding of a control molecule, which generally is a molecule of similar structure that does not have binding activity. For example, specific binding can be determined by competition with a control molecule that is similar to the target.

[0189] Specific binding for a particular antigen or an epitope can be exhibited, for example, by an antibody having a KD for an antigen or epitope of at least about 10⁻⁴ M, at least about 10⁻⁵ M, at least about 10⁻⁶ M, at least about 10⁻⁷ M, at least about 10⁻⁸M, at least about 10⁻⁹ M, alternatively at least about 10⁻¹⁰ M, at least about 10⁻¹¹ M, at least about 10⁻¹² M, or greater, where KD refers to a dissociation rate of a particular antibody-antigen interaction. Typically, an antibody that specifically binds an antigen will have a KD that is 20-, 50-, 100-, 500-, 1000-, 5,000-, 10,000- or more times greater for a control molecule relative to the antigen or epitope.

[0190] Also, specific binding for a particular antigen or an epitope can be exhibited, for example, by an antibody having a KA or Ka for an antigen or epitope of at least 20-, 50-, 100-, 500-, 1000-, 5,000-, 10,000- or more times greater for the epitope relative to a control, where KA or Ka refers to an association rate of a particular antibody-antigen interaction. Binding affinity is generally measured using a Biacore, SPR or BLI assay.

### IV. MSLN Binding Domains

[0191] In one aspect, provided herein are MSLN antigen binding domains (ABDs) and compositions that include such MSLN antigen binding domains (ABDs), including anti-MSLN antibodies. Subject antibodies that include such MSLN antigen binding domains (e.g., anti-MSLN x anti-CD3 bispecific antibodies) advantageously elicit a range of different immune responses. Such MSLN binding domains and related antibodies find use, for example, in the treatment of MSLN associated cancers.

[0192] As will be appreciated by those in the art, suitable MSLN binding domains can comprise a set of 6 CDRs as depicted in the sequence listing and FIGS. 15-21, either as the CDRs are underlined or, in the case where a different numbering scheme is used as described herein and as shown in Table 2, as the CDRs that are identified using other alignments within the variable heavy (VH) domain and variable light domain (VL) sequences of those depicted in FIGS. 15-21 and the Sequence Listing (see Table 2). Suitable MSLN ABDs can also include the entire VH and VL sequences as depicted in these sequences and figures, used as scFvs or as Fab domains.

[0193] In one embodiment, the MSLN antigen binding domain includes the 6 CDRs (i.e., vhCDR1-3 and vlCDR1-3) of a MSLN ABD described herein, including the figures and sequence listing. In exemplary embodiments, the MSLN ABD is one of the following MSLN ABDs: MESO-A[MSLN]_H1.1_L1, MESO-B[MSLN]_H0L0, MESO-C[MSLN]_H1L1, MESO-C[MSLN]_H1.1_L1, MESO-C[MSLN]_H1.2L1, MESO-C[MSLN]_H1.3_L1, MESO-C[MSLN]_H1.4_L1, MESO-C[MSLN]_H1.5_L1, MESO-C[MSLN]_H1.6_L1, MESO-C[MSLN]_H1.7_L1, MESO-C[MSLN]_H1.8_L1, MESO-C[MSLN]_H1.9_L1, MESO-C[MSLN]_H1_L1.1, MESO-C[MSLN]_H1_L1.2, MESO-C[MSLN]_H1_L1.3, MESO-C[MSLN]_H1_L1.4, MESO-C[MSLN]_H1_L1.5, MESO-C[MSLN]_H1_L1.6, MESO-C[MSLN]_H1_L1.7, MESO-C[MSLN]_H1_L1.8, MESO-C[MSLN]_H1_L1.9, MESO-C[MSLN]_H1_L1.10, MESO-C[MSLN]_H1.5_L1.3, MESO-C[MSLN]_H1.6_L1.3, MESO-C[MSLN]_H1.12_L1.9, MESO-C[MSLN]_H1.13_L1.9, MESO-C[MSLN]_H1.3_L1.13, MESO-C[MSLN]_H1.3_L1.14, MESO-C[MSLN]_H1.3_L1.15, MESO-C[MSLN]_H1.3_L1.16, MESO-C[MSLN]_H1.3_L1.17, MESO-C[MSLN]_H1.3_L1.18, MESO-C[MSLN]_H1.3_L1.9, MESO-C[MSLN]_H1.3_L1.5, MESO-C[MSLN]_H1_L1.20, MESO-C[MSLN]_H1.12_L1.20,MESO-C[MSLN]_H1.14_L1.14, MESO-C[MSLN]_H1.15_L1.14, MESO-C[MSLN]_H1.16_L1.14, MESO-C[MSLN]_H1_L1.19, MESO-C[MSLN]_H1_L1.21, MESO-C[MSLN]_H1_L1.22, MESO-C[MSLN]_H1.12_L1.19, MESO-C[MSLN]_H1.12_L1.21, MESO-C[MSLN]_H1.12_L1.22, and MESO-C[MSLN]_H1.12_L1.9 (FIGS. 15-21). In addition to the parental CDR sets disclosed in the figures and sequence listing that form an ABD to MSLN, provided herein are variant MSLN ABDs having CDRs that include at least one modification of the MSLN ABD CDRs disclosed herein. In one embodiment, the MSLN ABD includes a set of 6 CDRs with 1, 2, 3, 4, 5, 6, 7, 8, 9, 10 amino acid modifications as compared to the 6 CDRs of a MSLN ABD described herein, including the figures and sequence listing. In exemplary embodiments, the MSLN ABD includes a set of 6 CDRs with 1, 2, 3, 4, 5, 6, 7, 8, 9, 10 amino acid modifications as compared to the 6 CDRs of one of the following MSLN ABDs: MESO-A[MSLN]_H1.1_L1, MESO-B[MSLN]_H0L0, MESO-C[MSLN]_H1L1, MESO-C[MSLN]_H1.1_L1, MESO-C[MSLN]_H1.2L1, MESO-C[MSLN]_H1.3_L1, MESO-C[MSLN]_H1.4_L1, MESO-C[MSLN]_H1.5_L1, MESO-C[MSLN]_H1.6_L1, MESO-C[MSLN]_H1.7_L1, MESO-C[MSLN]_H1.8_L1, MESO-C[MSLN]_H1.9_L1, MESO-C[MSLN]_H1_L1.1, MESO-C[MSLN]_H1_L1.2, MESO-C[MSLN]_H1_L1.3, MESO-C[MSLN]_H1_L1.4, MESO-C[MSLN]_H1_L1.5, MESO-C[MSLN]_H1_L1.6, MESO-C[MSLN]_H1_L1.7, MESO-C[MSLN]_H1_L1.8, MESO-C[MSLN]_H1_L1.9, MESO-C[MSLN]_H1_L1.10, MESO-C[MSLN]_H1.5_L1.3, MESO-C[MSLN]_H1.6_L1.3, MESO-C[MSLN]_H1.12_L1.9, MESO-C[MSLN]_H1.13_L1.9, MESO-C[MSLN]_H1.3_L1.13, MESO-C[MSLN]_H1.3_L1.14, MESO-C[MSLN]_H1.3_L1.15, MESO-C[MSLN]_H1.3_L1.16, MESO-C[MSLN]_H1.3_L1.17, MESO-C[MSLN]_H1.3_L1.18, MESO-C[MSLN]_H1.3_L1.9, MESO-C[MSLN]_H1.3_L1.5, MESO-C[MSLN]_H1_L1.20, MESO-C[MSLN]_H1.12_L1.20, MESO-C[MSLN]_H1.14_L1.14, MESO-C[MSLN]_H1.15_L1.14, MESO-C[MSLN]_H1.16_L1.14, MESO-C[MSLN]_H1_L1.19, MESO-C[MSLN]_H1_L1.21, MESO-C[MSLN]_H1_L1.22, MESO-C[MSLN]_H1.12_L1.19, MESO-C[MSLN]_H1.12_L1.21, MESO-C[MSLN]_H1.12_L1.22, and MESO-C[MSLN]_H1.12_L1.9 (FIGS. 15-21).

[0194] In certain embodiments, the variant MSLN ABD is capable of binding MSLN antigen, as measured by at least one of a Biacore, surface plasmon resonance (SPR) and/or BLI (biolayer interferometry, e.g., Octet assay) assay, with the latter finding particular use in many embodiments. In particular embodiments, the MSLN ABD is capable of binding human MSLN antigen.

[0195] In one embodiment, the MSLN ABD includes 6 CDRs that are at least 90, 95, 97, 98 or 99% identical to the 6 CDRs of a MSLN ABD as described herein, including the figures and sequence listing. In exemplary embodiments, the MSLN ABD includes 6 CDRs that are at least 90, 95, 97, 98 or 99% identical to the 6 CDRs of one of the following MSLN ABDs: MESO-A[MSLN]_H1.1_L1, MESO-B[MSLN]_H0L0, MESO-C[MSLN]_H1L1, MESO-C[MSLN]_H1.1_L1, MESO-C[MSLN]_H1.2L1, MESO-C[MSLN]_H1.3_L1, MESO-C[MSLN]_H1.4_L1, MESO-C[MSLN]_H1.5_L1, MESO-C[MSLN]_H1.6_L1, MESO-C[MSLN]_H1.7_L1, MESO-C[MSLN]_H1.8_L1, MESO-C[MSLN]_H1.9_L1, MESO-C[MSLN]_H1_L1.1, MESO-C[MSLN]_H1_L1.2, MESO-C[MSLN]_H1_L1.3, MESO-C[MSLN]_H1_L1.4, MESO-C[MSLN]_H1_L1.5, MESO-C[MSLN]_H1_L1.6, MESO-C[MSLN]_H1_L1.7, MESO-C[MSLN]_H1_L1.8, MESO-C[MSLN]_H1_L1.9, MESO-C[MSLN]_H1_L1.10, MESO-C[MSLN]_H1.5_L1.3, MESO-C[MSLN]_H1.6_L1.3, MESO-C[MSLN]_H1.12_L1.9, MESO-C[MSLN]_H1.13_L1.9, MESO-C[MSLN]_H1.3_L1.13, MESO-C[MSLN]_H1.3_L1.14, MESO-C[MSLN]_H1.3_L1.15, MESO-C[MSLN]_H1.3_L1.16, MESO-C[MSLN]_H1.3_L1.17, MESO-C[MSLN]_H1.3_L1.18, MESO-C[MSLN]_H1.3_L1.9, MESO-C[MSLN]_H1.3_L1.5, MESO-C[MSLN]_H1_L1.20, MESO-C[MSLN]_H1.12_L1.20,MESO-C[MSLN]_H1.14_L1.14, MESO-C[MSLN]_H1.15_L1.14, MESO-C[MSLN]_H1.16_L1.14, MESO-C[MSLN]_H1_L1.19, MESO-C[MSLN]_H1_L1.21, MESO-C[MSLN]_H1_L1.22, MESO-C[MSLN]_H1.12_L1.19, MESO-C[MSLN]_H1.12_L1.21, MESO-C[MSLN]_H1.12_L1.22, and MESO-C[MSLN]_H1.12_L1.9 (FIGS. 15-21). In certain embodiments, the MSLN ABD is capable of binding to MSLN antigen, as measured by at least one of a Biacore, surface plasmon resonance (SPR) and/or BLI (biolayer interferometry, e.g., Octet assay) assay, with the latter finding particular use in many embodiments. In particular embodiments, the MSLN ABD is capable of binding human MSLN antigen (see FIG. 14A).

[0196] In another exemplary embodiment, the MSLN ABD include the variable heavy (VH) domain and variable light (VL) domain of any one of the MSLN ABDs described herein, including the figures and sequence listing (e.g., FIGS. 15-21). In exemplary embodiments, the MSLN ABD is one of the following MSLN ABDs: MESO-A[MSLN]_H1.1_L1, MESO-B[MSLN]_H0L0, MESO-C[MSLN]_H1L1, MESO-C[MSLN]_H1.1_L1, MESO-C[MSLN]_H1.2L1, MESO-C[MSLN]_H1.3_L1, MESO-C[MSLN]_H1.4_L1, MESO-C[MSLN]_H1.5_L1, MESO-C[MSLN]_H1.6_L1, MESO-C[MSLN]_H1.7_L1, MESO-C[MSLN]_H1.8_L1, MESO-C[MSLN]_H1.9_L1, MESO-C[MSLN]_H1_L1.1, MESO-C[MSLN]_H1_L1.2, MESO-C[MSLN]_H1_L1.3, MESO-C[MSLN]_H1_L1.4, MESO-C[MSLN]_H1_L1.5, MESO-C[MSLN]_H1_L1.6, MESO-C[MSLN]_H1_L1.7, MESO-C[MSLN]_H1_L1.8, MESO-C[MSLN]_H1_L1.9, MESO-C[MSLN]_H1_L1.10, MESO-C[MSLN]_H1.5_L1.3, MESO-C[MSLN]_H1.6_L1.3, MESO-C[MSLN]_H1.12_L1.9, MESO-C[MSLN]_H1.13_L1.9, MESO-C[MSLN]_H1.3_L1.13, MESO-C[MSLN]_H1.3_L1.14, MESO-C[MSLN]_H1.3_L1.15, MESO-C[MSLN]_H1.3_L1.16, MESO-C[MSLN]_H1.3_L1.17, MESO-C[MSLN]_H1.3_L1.18, MESO-C[MSLN]_H1.3_L1.9, MESO-C[MSLN]_H1.3_L1.5, MESO-C[MSLN]_H1_L1.20, MESO-C[MSLN]_H1.12_L1.20,MESO-C[MSLN]_H1.14_L1.14, MESO-C[MSLN]_H1.15_L1.14, MESO-C[MSLN]_H1.16_L1.14, MESO-C[MSLN]_H1_L1.19, MESO-C[MSLN]_H1_L1.21, MESO-C[MSLN]_H1_L1.22, MESO-C[MSLN]_H1.12_L1.19, MESO-C[MSLN]_H1.12_L1.21, MESO-C[MSLN]_H1.12_L1.22, and MESO-C[MSLN]_H1.12_L1.9 (FIGS. 15-21).

[0197] In addition to the parental MSLN variable heavy and variable light domains disclosed herein, provided herein are MSLN ABDs that include a variable heavy domain and/or a variable light domain that are variants of a MSLN ABD VH and VL domain disclosed herein. In one embodiment, the variant VH domain and/or VL domain has from 1, 2, 3, 4, 5, 6, 7, 8, 9 or 10 amino acid changes from a VH and/or VL domain of a MSLN ABD described herein, including the figures and sequence listing. In exemplary embodiments, the variant VH domain and/or VL domain has from 1, 2, 3, 4, 5, 6, 7, 8, 9 or 10 amino acid changes from a VH and/or VL domain of one of the following MSLN ABDs: MESO-A[MSLN]_H1.1_L1, MESO-B[MSLN]_H0L0, MESO-C[MSLN]_H1L1, MESO-C[MSLN]_H1.1_L1, MESO-C[MSLN]_H1.2L1, MESO-C[MSLN]_H1.3_L1, MESO-C[MSLN]_H1.4_L1, MESO-C[MSLN]_H1.5_L1, MESO-C[MSLN]_H1.6_L1, MESO-C[MSLN]_H1.7_L1, MESO-C[MSLN]_H1.8_L1, MESO-C[MSLN]_H1.9_L1, MESO-C[MSLN]_H1_L1.1, MESO-C[MSLN]_H1_L1.2, MESO-C[MSLN]_H1_L1.3, MESO-C[MSLN]_H1_L1.4, MESO-C[MSLN]_H1_L1.5, MESO-C[MSLN]_H1_L1.6, MESO-C[MSLN]_H1_L1.7, MESO-C[MSLN]_H1_L1.8, MESO-C[MSLN]_H1_L1.9, MESO-C[MSLN]_H1_L1.10, MESO-C[MSLN]_H1.5_L1.3, MESO-C[MSLN]_H1.6_L1.3, MESO-C[MSLN]_H1.12_L1.9, MESO-C[MSLN]_H1.13_L1.9, MESO-C[MSLN]_H1.3_L1.13, MESO-C[MSLN]_H1.3_L1.14, MESO-C[MSLN]_H1.3_L1.15, MESO-C[MSLN]_H1.3_L1.16, MESO-C[MSLN]_H1.3_L1.17, MESO-C[MSLN]_H1.3_L1.18, MESO-C[MSLN]_H1.3_L1.9, MESO-C[MSLN]_H1.3_L1.5, MESO-C[MSLN]_H1_L1.20, MESO-C[MSLN]_H1.12_L1.20,MESO-C[MSLN]_H1.14_L1.14, MESO-C[MSLN]_H1.15_L1.14, MESO-C[MSLN]_H1.16_L1.14, MESO-C[MSLN]_H1_L1.19, MESO-C[MSLN]_H1_L1.21, MESO-C[MSLN]_H1_L1.22, MESO-C[MSLN]_H1.12_L1.19, MESO-C[MSLN]_H1.12_L1.21, MESO-C[MSLN]_H1.12_L1.22, and MESO-C[MSLN]_H1.12_L1.9 (FIGS. 15-21). In certain embodiments, the MSLN ABD is capable of binding to MSLN, as measured at least one of a Biacore, surface plasmon resonance (SPR) and/or BLI (biolayer interferometry, e.g., Octet assay) assay, with the latter finding particular use in many embodiments. In particular embodiments, the MSLN ABD is capable of binding human MSLN antigen.

[0198] In one embodiment, the variant VH and/or VL domain is at least 90, 95, 97, 98 or 99% identical to the VH and/or VL of a MSLN ABD as described herein, including the figures and sequence listing. In exemplary embodiments, the variant VH and/or VL domain is at least 90, 95, 97, 98 or 99% identical to the VH and/or VL of one of the following MSLN ABDs: MESO-A[MSLN]_H1.1_L1, MESO-B[MSLN]_H0L0, MESO-C[MSLN]_H1L1, MESO-C[MSLN]_H1.1_L1, MESO-C[MSLN]_H1.2L1, MESO-C[MSLN]_H1.3_L1, MESO-C[MSLN]_H1.4_L1, MESO-C[MSLN]_H1.5_L1, MESO-C[MSLN]_H1.6_L1, MESO-C[MSLN]_H1.7_L1, MESO-C[MSLN]_H1.8_L1, MESO-C[MSLN]_H1.9_L1, MESO-C[MSLN]_H1_L1.1, MESO-C[MSLN]_H1_L1.2, MESO-C[MSLN]_H1_L1.3, MESO-C[MSLN]_H1_L1.4, MESO-C[MSLN]_H1_L1.5, MESO-C[MSLN]_H1_L1.6, MESO-C[MSLN]_H1_L1.7, MESO-C[MSLN]_H1_L1.8, MESO-C[MSLN]_H1_L1.9, MESO-C[MSLN]_H1_L1.10, MESO-C[MSLN]_H1.5_L1.3, MESO-C[MSLN]_H1.6_L1.3, MESO-C[MSLN]_H1.12_L1.9, MESO-C[MSLN]_H1.13_L1.9, MESO-C[MSLN]_H1.3_L1.13, MESO-C[MSLN]_H1.3_L1.14, MESO-C[MSLN]_H1.3_L1.15, MESO-C[MSLN]_H1.3_L1.16, MESO-C[MSLN]_H1.3_L1.17, MESO-C[MSLN]_H1.3_L1.18, MESO-C[MSLN]_H1.3_L1.9, MESO-C[MSLN]_H1.3_L1.5, MESO-C[MSLN]_H1_L1.20, MESO-C[MSLN]_H1.12_L1.20,MESO-C[MSLN]_H1.14_L1.14, MESO-C[MSLN]_H1.15_L1.14, MESO-C[MSLN]_H1.16_L1.14, MESO-C[MSLN]_H1_L1.19, MESO-C[MSLN]_H1_L1.21, MESO-C[MSLN]_H1_L1.22, MESO-C[MSLN]_H1.12_L1.19, MESO-C[MSLN]_H1.12_L1.21, MESO-C[MSLN]_H1.12_L1.22, and MESO-C[MSLN]_H1.12_L1.9 (FIGS. 15-21). In certain embodiments, the MSLN ABD is capable of binding to the MSLN, as measured by at least one of a Biacore, surface plasmon resonance (SPR) and/or BLI (biolayer interferometry, e.g., Octet assay) assay, with the latter finding particular use in many embodiments. In particular embodiments, the MSLN ABD is capable of binding human MSLN antigen.

### V. Antibodies

[0199] In one aspect, provided herein are antibodies that bind to MSLN (e.g., anti-MSLN antibodies). In certain embodiments, the antibody binds to human MSLN (FIG. 14A). Subject anti-MSLN antibodies include monospecific MSLN antibodies, as well as multi-specific (e.g., bispecific) anti-MSLN antibodies. In certain embodiments, the anti-MSLN antibody has a format according to any one of the antibody formats depicted in FIGS. 22A, 22B, and 43A-43K.

[0200] In some embodiments, the subject compositions include a MSLN binding domain. In some embodiments, the composition includes an antibody having a MSLN binding domain. Antibodies provided herein include one, two, three, four, and five or more MSLN binding domains. In certain embodiments, the MSLN binding domain includes any one of the vhCDR1, vhCDR2, vhCDR3, vlCDR1, vlCDR2 and vlCDR3 sequences of a MSLN binding domain selected from those depicted in FIGS. 15-21. In some embodiments, the MSLN binding domain includes the underlined vhCDR1, vhCDR2, vhCDR3, vlCDR1, vlCDR2 and vlCDR3 sequences of a MSLN binding domain selected from those depicted in FIGS. 15-21. In some embodiments, the MSLN binding domain includes the variable heavy domain and variable light domain of a MSLN binding domain selected from those depicted in FIGS. 15-21. MSLN binding domains depicted in FIGS. 15-21 include: MESO-A[MSLN]_H1.1_L1, MESO-B[MSLN]_H0L0, MESO-C[MSLN]_H1L1, MESO-C[MSLN]_H1.1_L1, MESO-C[MSLN]_H1.2L1, MESO-C[MSLN]_H1.3_L1, MESO-C[MSLN]_H1.4_L1, MESO-C[MSLN]_H1.5_L1, MESO-C[MSLN]_H1.6_L1, MESO-C[MSLN]_H1.7_L1, MESO-C[MSLN]_H1.8_L1, MESO-C[MSLN]_H1.9_L1, MESO-C[MSLN]_H1_L1.1, MESO-C[MSLN]_H1_L1.2, MESO-C[MSLN]_H1_L1.3, MESO-C[MSLN]_H1_L1.4, MESO-C[MSLN]_H1_L1.5, MESO-C[MSLN]_H1_L1.6, MESO-C[MSLN]_H1_L1.7, MESO-C[MSLN]_H1_L1.8, MESO-C[MSLN]_H1_L1.9, MESO-C[MSLN]_H1_L1.10, MESO-C[MSLN]_H1.5_L1.3, MESO-C[MSLN]_H1.6_L1.3, MESO-C[MSLN]_H1.12_L1.9, MESO-C[MSLN]_H1.13_L1.9, MESO-C[MSLN]_H1.3_L1.13, MESO-C[MSLN]_H1.3_L1.14, MESO-C[MSLN]_H1.3_L1.15, MESO-C[MSLN]_H1.3_L1.16, MESO-C[MSLN]_H1.3_L1.17, MESO-C[MSLN]_H1.3_L1.18, MESO-C[MSLN]_H1.3_L1.9, MESO-C[MSLN]_H1.3_L1.5, MESO-C[MSLN]_H1_L1.20, MESO-C[MSLN]_H1.12_L1.20, MESO-C[MSLN]_H1.14_L1.14, MESO-C[MSLN]_H1.15_L1.14, MESO-C[MSLN]_H1.16_L1.14, MESO-C[MSLN]_H1_L1.19, MESO-C[MSLN]_H1_L1.21, MESO-C[MSLN]_H1_L1.22, MESO-C[MSLN]_H1.12_L1.19, MESO-C[MSLN]_H1.12_L1.21, MESO-C[MSLN]_H1.12_L1.22, and MESO-C[MSLN]_H1.12_L1.9 (FIGS. 15-21).

[0201] In one aspect, provided herein are bispecific antibodies that bind to MSLN and CD3, in various formats as outlined below, and generally depicted in FIGS. 22A-22B, and 43A-43K. These bispecific, heterodimeric antibodies include a MSLN binding domain. In certain embodiments, the MSLN binding domain includes the VHCDR1, VHCDR2, VHCDR3, VLCDR1, VLCDR2 and VLCDR3 sequences of a MSLN binding domain selected from the group consisting of those depicted in FIGS. 15-21. In some embodiments, the MSLN binding domain includes the underlined VHCDR1, VHCDR2, VHCDR3, VLCDR1, VLCDR2 and VLCDR3 sequences of a MSLN binding domain selected from those depicted in FIGS. 15-21.

[0202] These bispecific heterodimeric antibodies bind MSLN and CD3. Such antibodies include a CD3 binding domain and at least one MSLN binding domain. Any suitable MSLN binding domain can be included in the anti-MSLN x anti-CD3 bispecific antibody. In some embodiments, the anti-MSLN x anti-CD3 bispecific antibody includes one, two, three, four or more MSLN binding domains, including but not limited to those depicted in FIGS. 15-21. In certain embodiments, the anti-MSLN x anti-CD3 antibody includes a MSLN binding domain that includes the VHCDR1, VHCDR2, VHCDR3, VLCDR1, VLCDR2 and VLCDR3 sequences of a MSLN binding domain selected from the group consisting of those depicted in FIGS. 15-21. In some embodiments, the anti-MSLN x anti-CD3 antibody includes a MSLN binding domain that includes the underlined VHCDR1, VHCDR2, VHCDR3, VLCDR1, VLCDR2 and VLCDR3 sequences of a MSLN binding domain selected from the group consisting of those depicted in FIGS. 15-21. In some embodiments, the anti-MSLN x anti-CD3 antibody includes a MSLN binding domain that includes the variable heavy domain and variable light domain of a MSLN binding domain selected from the group consisting of those depicted in FIGS. 15-21. In an exemplary embodiment, the anti-MSLN x anti-CD3 antibody includes an anti-MSLN MESO-C[MSLN]_H1L1 binding domain.

[0203] The anti-MSLN x anti-CD3 antibody provided herein can include any suitable CD3 binding domain. In certain embodiments, the anti-MSLN X anti-CD3 antibody includes a CD3 binding domain that includes the VHCDR1, VHCDR2, VHCDR3, VLCDR1, VLCDR2 and VLCDR3 sequences of a CD3 binding domain selected from the group consisting of those depicted in FIGS. 10A-F. In some embodiments, the anti-MSLN x anti-CD3 antibody includes a CD3 binding domain that includes the underlined VHCDR1, VHCDR2, VHCDR3, VLCDR1, VLCDR2 and VLCDR3 sequences of a CD3 binding domain selected from the group consisting of those depicted in FIGS. 10A-10F. In some embodiments, the anti-MSLN x anti-CD3 antibody includes a CD3 binding domain that includes the variable heavy domain and variable light domain of a CD3 binding domain selected from the group consisting of those depicted in FIG. 10A-10F. In some embodiments, the CD3 binding domain is selected from anti-CD3_H1.30_L1.47, anti-CD3 H1.32_L1.47; anti-CD3_H1.89_L1.48; anti-CD3_H1.90_L1.47; Anti-CD3_H1.33_L1.47; and anti-CD3_H1.31_L1.47. As outlined herein, these anti-CD3 antigen binding domains (CD3-ABDs) can be used in scFv formats in either orientation (e.g. from N- to C-terminal, VH-scFv linker-VL or VL-scFv linker-VH).

[0204] The antibodies provided herein include different antibody domains. As described herein and known in the art, the antibodies described herein include different domains within the heavy and light chains, which can be overlapping as well. These domains include, but are not limited to, the Fc domain, the CH1 domain, the CH2 domain, the CH3 domain, the hinge domain, the heavy constant domain (CH1-hinge-Fc domain or CH1-hinge-CH2-CH3), the variable heavy domain, the variable light domain, the light constant domain, Fab domains and scFv domains.

[0205] As shown herein, there are a number of suitable linkers (for use as either domain linkers or scFv linkers) that can be used to covalently attach the recited domains (e.g., scFvs, Fabs, Fc domains, etc.), including traditional peptide bonds, generated by recombinant techniques. Exemplary linkers to attach domains of the subject antibody to each other are depicted in FIG. 6. In some embodiments, the linker peptide may predominantly include the following amino acid residues: Gly, Ser, Ala, or Thr. The linker peptide should have a length that is adequate to link two molecules in such a way that they assume the correct conformation relative to one another so that they retain the desired activity. In one embodiment, the linker is from about 1 to 50 amino acids in length, preferably about 1 to 30 amino acids in length. In one embodiment, linkers of 1 to 20 amino acids in length may be used, with from about 5 to about 10 amino acids finding use in some embodiments. Useful linkers include glycine-serine polymers, including for example (GS)n, (GSGGS)n (SEQ ID NO: 3), (GGGGS)n (SEQ ID NO: 618), and (GGGS)n (SEQ ID NO: 4), where n is an integer of at least one (and generally from 3 to 4), glycine-alanine polymers, alanine-serine polymers, and other flexible linkers, some of which are shown in FIG. 5 and FIG. 6. Alternatively, a variety of nonproteinaceous polymers, including but not limited to polyethylene glycol (PEG), polypropylene glycol, polyoxyalkylenes, or copolymers of polyethylene glycol and polypropylene glycol, may find use as linkers.

[0206] Other linker sequences may include any sequence of any length of CL/CH1 domain but not all residues of CL/CH1 domain; for example the first 5-12 amino acid residues of the CL/CH1 domains. Linkers can be derived from immunoglobulin light chain, for example Cκ or Cλ. Linkers can be derived from immunoglobulin heavy chains of any isotype, including for example Cγ1, Cγ2, Cγ3, Cγ4, Cα1, Cα2, Cδ, Cε, and Cμ. Linker sequences may also be derived from other proteins such as Ig-like proteins (e.g. TCR, FcR, KIR), hinge region-derived sequences, and other natural sequences from other proteins.

[0207] In some embodiments, the linker is a “domain linker”, used to link any two domains as outlined herein together. For example, in FIG. 22B, there may be a domain linker that attaches the C-terminus of the CH1 domain of the Fab to the N-terminus of the scFv, with another optional domain linker attaching the C-terminus of the scFv to the CH2 domain (although in many embodiments the hinge is used as this domain linker). While any suitable linker can be used, many embodiments utilize a glycine-serine polymer as the domain linker, including for example (GS)n, (GSGGS)n (SEQ ID NO: 3), (GGGGS)n (SEQ ID NO: 618), and (GGGS)n (SEQ ID NO: 4), where n is an integer of at least one (and generally from 3 to 4 to 5) as well as any peptide sequence that allows for recombinant attachment of the two domains with sufficient length and flexibility to allow each domain to retain its biological function. In some cases, and with attention being paid to “strandedness”, as outlined below, charged domain linkers, as used in some embodiments of scFv linkers can be used. Exemplary useful domain linkers are depicted in FIG. 6.

[0208] With particular reference to the domain linker used to attach the scFv domain to the Fc domain in the “2+1” format, there are several domain linkers that find particular use, including “full hinge C220S variant,” “flex half hinge,” “charged half hinge 1,” and “charged half hinge 2” as shown in FIG. 6.

[0209] In some embodiments, the linker is a “scFv linker”, used to covalently attach the VH and VL domains as discussed herein. In many cases, the scFv linker is a charged scFv linker, a number of which are shown in FIG. 5. Accordingly, in some embodiments, the antibodies described herein further provide charged scFv linkers, to facilitate the separation in pI between a first and a second monomer. That is, by incorporating a charged scFv linker, either positive or negative (or both, in the case of scaffolds that use scFvs on different monomers), this allows the monomer comprising the charged linker to alter the pI without making further changes in the Fc domains. These charged linkers can be substituted into any scFv containing standard linkers. Again, as will be appreciated by those in the art, charged scFv linkers are used on the correct “strand” or monomer, according to the desired changes in pI. For example, as discussed herein, to make 1+1 Fab-scFv-Fc format heterodimeric antibody, the original pI of the Fv region for each of the desired antigen binding domains are calculated, and one is chosen to make an scFv, and depending on the pI, either positive or negative linkers are chosen.

[0210] Charged domain linkers can also be used to increase the pI separation of the monomers of the antibodies described herein as well, and thus those included in FIG. 5 can be used in any embodiment herein where a linker is utilized.

[0211] In particular, the formats depicted in FIGS. 22A and 22B are antibodies, usually referred to as “heterodimeric antibodies”, meaning that the protein has at least two associated Fc sequences self-assembled into a heterodimeric Fc domain and at least two Fv regions, whether as Fabs or as scFvs.

[0212] The MSLN binding domains provided can be included in any useful antibody format including, for example, canonical immunoglobulin, as well as the 1+1 Fab-scFv-Fc and 2+1 Fab2-scFv-Fv formats provided herein. Other useful antibody formats include, but are not limited to, “mAb-Fv,” “mAb-scFv,” “central-Fv”, “one armed scFv-mAb,” “scFv-mAb,” “dual scFv,” and “trident” format antibodies, as disclosed in FIGS. 43A-43K.

[0213] In some embodiments, the subject antibody includes one or more of the MSLN ABDs provided herein. In some embodiments, the antibody includes one MSLN ABD. In other embodiments, the antibody includes two MSLN ABDs. In exemplary embodiments, the MSLN ABD includes the variable heavy domain and variable light domain of one of the following MSLN ABDs: MESO-A[MSLN]_H1.1_L1, MESO-B[MSLN]_H0L0, MESO-C[MSLN]_H1L1, MESO-C[MSLN]_H1.1_L1, MESO-C[MSLN]_H1.2L1, MESO-C[MSLN]_H1.3_L1, MESO-C[MSLN]_H1.4_L1, MESO-C[MSLN]_H1.5_L1, MESO-C[MSLN]_H1.6_L1, MESO-C[MSLN]_H1.7_L1, MESO-C[MSLN]_H1.8_L1, MESO-C[MSLN]_H1.9_L1, MESO-C[MSLN]_H1_L1.1, MESO-C[MSLN]_H1_L1.2, MESO-C[MSLN]_H1_L1.3, MESO-C[MSLN]_H1_L1.4, MESO-C[MSLN]_H1_L1.5, MESO-C[MSLN]_H1_L1.6, MESO-C[MSLN]_H1_L1.7, MESO-C[MSLN]_H1_L1.8, MESO-C[MSLN]_H1_L1.9, MESO-C[MSLN]_H1_L1.10, MESO-C[MSLN]_H1.5_L1.3, MESO-C[MSLN]_H1.6_L1.3, MESO-C[MSLN]_H1.12_L1.9, MESO-C[MSLN]_H1.13_L1.9, MESO-C[MSLN]_H1.3_L1.13, MESO-C[MSLN]_H1.3_L1.14, MESO-C[MSLN]_H1.3_L1.15, MESO-C[MSLN]_H1.3_L1.16, MESO-C[MSLN]_H1.3_L1.17, MESO-C[MSLN]_H1.3_L1.18, MESO-C[MSLN]_H1.3_L1.9, MESO-C[MSLN]_H1.3_L1.5, MESO-C[MSLN]_H1_L1.20, MESO-C[MSLN]_H1.12_L1.20,_MESO-C[MSLN]_H1.14_L1.14, MESO-C[MSLN]_H1.15_L1.14, MESO-C[MSLN]_H1.16_L1.14, MESO-C[MSLN]_H1_L1.19, MESO-C[MSLN]_H1_L1.21, MESO-C[MSLN]_H1_L1.22, MESO-C[MSLN]_H1.12_L1.19, MESO-C[MSLN]_H1.12_L1.21, MESO-C[MSLN]_H1.12_L1.22, and MESO-C[MSLN]_H1.12_L1.9 (FIGS. 15-21).

[0214] In an exemplary embodiment, the antibody is a bispecific antibody that includes one or two MSLN ABDs, including any of the MSLN ABDs provided herein. Bispecific antibody that include such MSLN ABDs include, for example, 1+1 Fab-scFv-Fc and 2+1 Fab₂-scFv-Fc bispecifics format antibodies. In exemplary embodiments, the MSLN ABD is one of the following MSLN ABDs: MESO-A[MSLN]_H1.1_L1, MESO-C[MSLN]_H0L0, MESO-C[MSLN]_H1L1, MESO-C[MSLN]_H1.1_L1, MESO-C[MSLN]_H1.2L1, MESO-C[MSLN]_H1.3_L1, MESO-C[MSLN]_H1.4_L1, MESO-C[MSLN]_H1.5_L1, MESO-C[MSLN]_H1.6_L1, MESO-C[MSLN]_H1.7_L1, MESO-C[MSLN]_H1.8_L1, MESO-C[MSLN]_H1.9_L1, MESO-C[MSLN]_H1_L1.1, MESO-C[MSLN]_H1_L1.2, MESO-C[MSLN]_H1_L1.3, MESO-C[MSLN]_H1_L1.4, MESO-C[MSLN]_H1_L1.5, MESO-C[MSLN]_H1_L1.6, MESO-C[MSLN]_H1_L1.7, MESO-C[MSLN]_H1_L1.8, MESO-C[MSLN]_H1_L1.9, MESO-C[MSLN]_H1_L1.10, MESO-C[MSLN]_H1.5_L1.3, MESO-C[MSLN]_H1.6_L1.3, MESO-C[MSLN]_H1.12_L1.9, MESO-C[MSLN]_H1.13_L1.9, MESO-C[MSLN]_H1.3_L1.13, MESO-C[MSLN]_H1.3_L1.14, MESO-C[MSLN]_H1.3_L1.15, MESO-C[MSLN]_H1.3_L1.16, MESO-C[MSLN]_H1.3_L1.17, MESO-C[MSLN]_H1.3_L1.18, MESO-C[MSLN]_H1.3_L1.9, MESO-C[MSLN]_H1.3_L1.5, MESO-C[MSLN]_H1_L1.20, MESO-C[MSLN]_H1.12_L1.20,_MESO-C[MSLN]_H1.14_L1.14, MESO-C[MSLN]_H1.15_L1.14, MESO-C[MSLN]_H1.16_L1.14, MESO-C[MSLN]_H1_L1.19, MESO-C[MSLN]_H1_L1.21, MESO-C[MSLN]_H1_L1.22, MESO-C[MSLN]_H1.12_L1.19, MESO-C[MSLN]_H1.12_L1.21, MESO-C[MSLN]_H1.12_L1.22, and MESO-C[MSLN]_H1.12_L1.9 (FIGS. 15-21). In exemplary embodiments, the MSLN binding domains is a Fab. In some embodiments, such bispecific antibodies are heterodimeric bispecific antibodies that include any of the heterodimerization skew variants, pI variants and/or ablation variants described herein.

### A. Chimeric and Humanized Antibodies

[0215] In certain embodiments, the antibodies described herein comprise a heavy chain variable region from a particular germline heavy chain immunoglobulin gene and/or a light chain variable region from a particular germline light chain immunoglobulin gene. For example, such antibodies may comprise or consist of a human antibody comprising heavy or light chain variable regions that are “the product of” or “derived from” a particular germline sequence. A human antibody that is “the product of” or “derived from” a human germline immunoglobulin sequence can be identified as such by comparing the amino acid sequence of the human antibody to the amino acid sequences of human germline immunoglobulins and selecting the human germline immunoglobulin sequence that is closest in sequence (i.e., greatest % identity) to the sequence of the human antibody (using the methods outlined herein). A human antibody that is “the product of” or “derived from” a particular human germline immunoglobulin sequence may contain amino acid differences as compared to the germline sequence, due to, for example, naturally-occurring somatic mutations or intentional introduction of site-directed mutation. However, a humanized antibody typically is at least 90% identical in amino acids sequence to an amino acid sequence encoded by a human germline immunoglobulin gene and contains amino acid residues that identify the antibody as being derived from human sequences when compared to the germline immunoglobulin amino acid sequences of other species (e.g., murine germline sequences). In certain cases, a humanized antibody may be at least 95, 96, 97, 98 or 99%, or even at least 96%, 97%, 98%, or 99% identical in amino acid sequence to the amino acid sequence encoded by the germline immunoglobulin gene. Typically, a humanized antibody derived from a particular human germline sequence will display no more than 10-20 amino acid differences from the amino acid sequence encoded by the human germline immunoglobulin gene (prior to the introduction of any skew, pI and ablation variants herein; that is, the number of variants is generally low, prior to the introduction of the variants described herein). In certain cases, the humanized antibody may display no more than 5, or even no more than 4, 3, 2, or 1 amino acid difference from the amino acid sequence encoded by the germline immunoglobulin gene (again, prior to the introduction of any skew, pI and ablation variants herein; that is, the number of variants is generally low, prior to the introduction of the variants described herein).

[0216] In one embodiment, the parent antibody has been affinity matured, as is known in the art. Structure-based methods may be employed for humanization and affinity maturation, for example as described in U.S. Ser. No. 11/004,590. Selection based methods may be employed to humanize and/or affinity mature antibody variable regions, including but not limited to methods described in Wu et al., 1999, J. Mol. Biol. 294:151-162; Baca et al., 1997, J. Biol. Chem. 272(16):10678-10684; Rosok et al., 1996, J. Biol. Chem. 271(37): 22611-22618; Rader et al., 1998, Proc. Natl. Acad. Sci. USA 95: 8910-8915; Krauss et al., 2003, Protein Engineering 16(10):753-759, all entirely incorporated by reference. Other humanization methods may involve the grafting of only parts of the CDRs, including but not limited to methods described in U.S. Ser. No. 09/810,510; Tan et al., 2002, J. Immunol. 169:1119-1125; De Pascalis et al., 2002, J. Immunol. 169:3076-3084, all entirely incorporated by reference.

### B. Heterodimeric Antibodies

[0217] In exemplary embodiments, the bispecific antibodies provided herein are heterodimeric bispecific antibodies that include two variant Fc domain sequences. Such variant Fc domains include amino acid modifications to facilitate the self-assembly and/or purification of the heterodimeric antibodies.

[0218] An ongoing problem in antibody technologies is the desire for “bispecific” antibodies that bind to two different antigens simultaneously, in general thus allowing the different antigens to be brought into proximity and resulting in new functionalities and new therapies. In general, these antibodies are made by including genes for each heavy and light chain into the host cells. This generally results in the formation of the desired heterodimer (A-B), as well as the two homodimers (A-A and B-B (not including the light chain heterodimeric issues)). However, a major obstacle in the formation of bispecific antibodies is the difficulty in biasing the formation of the desired heterodimeric antibody over the formation of the homodimers and/or purifying the heterodimeric antibody away from the homodimers.

[0219] There are a number of mechanisms that can be used to generate the subject heterodimeric antibodies. In addition, as will be appreciated by those in the art, these different mechanisms can be combined to ensure high heterodimerization. Amino acid modifications that facilitate the production and purification of heterodimers are collectively referred to generally as “heterodimerization variants.” As discussed below, heterodimerization variants include “skew” variants (e.g., the “knobs and holes” and the “charge pairs” variants described below) as well as “pI variants,” which allow purification of heterodimers from homodimers. As is generally described in U.S. Pat. No. 9,605,084, hereby incorporated by reference in its entirety and specifically as below for the discussion of heterodimerization variants, useful mechanisms for heterodimerization include “knobs and holes” (“KIH”) as described in U.S. Pat. No. 9,605,084, “electrostatic steering” or “charge pairs” as described in U.S. Pat. No. 9,605,084, pI variants as described in U.S. Pat. No. 9,605,084, and general additional Fc variants as outlined in U.S. Pat. No. 9,605,084 and below.

[0220] Heterodimerization variants that are useful for the formation and purification of the subject heterodimeric antibody (e.g., bispecific antibodies) are further discussed in detailed below.

[0221] 1. Skew Variants

[0222] In some embodiments, the heterodimeric antibody includes skew variants which are one or more amino acid modifications in a first Fc domain (A) and/or a second Fc domain (B) that favor the formation of Fc heterodimers (Fc dimers that include the first and the second Fc domain; (A-B) over Fc homodimers (Fc dimers that include two of the first Fc domain or two of the second Fc domain; A-A or B-B). Suitable skew variants are included in the FIG. 29 of US Publ. App. No. 2016/0355608, hereby incorporated by reference in its entirety and specifically for its disclosure of skew variants, as well as in FIGS. 1A-1E and FIG. 4.

[0223] One mechanism is generally referred to in the art as “knobs and holes”, referring to amino acid engineering that creates steric influences to favor heterodimeric formation and disfavor homodimeric formation can also optionally be used; this is sometimes referred to as “knobs and holes”, as described in U.S. Ser. No. 61/596,846, Ridgway et al., Protein Engineering 9(7):617 (1996); Atwell et al., J. Mol. Biol. 1997 270:26; U.S. Pat. No. 8,216,805, all of which are hereby incorporated by reference in their entirety. The Figures identify a number of “monomer A-monomer B” pairs that rely on “knobs and holes”. In addition, as described in Merchant et al., Nature Biotech. 16:677 (1998), these “knobs and hole” mutations can be combined with disulfide bonds to skew formation to heterodimerization.

[0224] An additional mechanism that finds use in the generation of heterodimers is sometimes referred to as “electrostatic steering” as described in Gunasekaran et al., J. Biol. Chem. 285(25):19637 (2010), hereby incorporated by reference in its entirety. This is sometimes referred to herein as “charge pairs”. In this embodiment, electrostatics are used to skew the formation towards heterodimerization. As those in the art will appreciate, these may also have an effect on pI, and thus on purification, and thus could in some cases also be considered pI variants. However, as these were generated to force heterodimerization and were not used as purification tools, they are classified as “steric variants”. These include, but are not limited to, D221E/P228E/L368E paired with D221R/P228R/K409R (e.g. these are “monomer corresponding sets) and C220E/P228E/368E paired with C220R/E224R/P228R/K409R.

[0225] In some embodiments, the skew variants advantageously and simultaneously favor heterodimerization based on both the “knobs and holes” mechanism as well as the “electrostatic steering” mechanism. In some embodiments, the heterodimeric antibody includes one or more sets of such heterodimerization skew variants. These variants come in “pairs” of “sets”. That is, one set of the pair is incorporated into the first monomer and the other set of the pair is incorporated into the second monomer. It should be noted that these sets do not necessarily behave as “knobs in holes” variants, with a one-to-one correspondence between a residue on one monomer and a residue on the other. That is, these pairs of sets may instead form an interface between the two monomers that encourages heterodimer formation and discourages homodimer formation, allowing the percentage of heterodimers that spontaneously form under biological conditions to be over 90%, rather than the expected 50% (25% homodimer A/A:50% heterodimer A/B:25% homodimer B/B). Exemplary heterodimerization “skew” variants are depicted in FIG. 4. In exemplary embodiments, the heterodimeric antibody includes a S364K/E357Q:L368D/K370S; L368D/K370S:S364K; L368E/K370S:S364K; T411T/E360E/Q362E:D401K; L368D/K370S:S364K/E357L; K370S:S364K/E357Q; or a T366S/L368A/Y407V:T366W (optionally including a bridging disulfide, T366S/L368A/Y407V/Y349C:T366W/S354C) “skew” variant amino acid substitution set. In an exemplary embodiment, the heterodimeric antibody includes a “S364K/E357Q:L368D/K370S” amino acid substitution set. In terms of nomenclature, the pair “S364K/E357Q:L368D/K370S” means that one of the monomers includes an Fc domain that includes the amino acid substitutions S364K and E357Q and the other monomer includes an Fc domain that includes the amino acid substitutions L368D and K370S; as above, the “strandedness” of these pairs depends on the starting pI.

[0226] In some embodiments, the skew variants provided herein can be optionally and independently incorporated with any other modifications, including, but not limited to, other skew variants (see, e.g., in FIG. 37 of US Publ. App. No. 2012/0149876, herein incorporated by reference, particularly for its disclosure of skew variants), pI variants, isotypic variants, FcRn variants, ablation variants, etc. into one or both of the first and second Fc domains of the heterodimeric antibody. Further, individual modifications can also independently and optionally be included or excluded from the subject the heterodimeric antibody.

[0227] Additional monomer A and monomer B variants that can be combined with other variants, optionally and independently in any amount, such as pI variants outlined herein or other steric variants that are shown in FIG. 37 of US 2012/0149876, the figure and legend and SEQ ID NOs of which are incorporated expressly by reference herein.

[0228] In some embodiments, the steric variants outlined herein can be optionally and independently incorporated with any pI variant (or other variants such as Fc variants, FcRn variants, etc.) into one or both monomers, and can be independently and optionally included or excluded from the proteins of the antibodies described herein.

[0229] A list of suitable skew variants is found in FIGS. 1A-1E, with FIG. 4 showing some pairs of particular utility in many embodiments. Of particular use in many embodiments are the pairs of sets including, but not limited to, S364K/E357Q:L368D/K370S; L368D/K370S:S364K; L368E/K370S:S364K; T411T/E360E/Q362E:D401K; L368D/K370S:S364K/E357L and K370S:S364K/E357Q. In terms of nomenclature, the pair “S364K/E357Q:L368D/K370S” means that one of the monomers has the double variant set S364K/E357Q and the other has the double variant set L368D/K370S.

[0230] 2. pI (Isoelectric Point) Variants for Heterodimers

[0231] In some embodiments, the heterodimeric antibody includes purification variants that advantageously allow for the separation of heterodimeric antibody (e.g., anti-MSLN x anti-CD3 bispecific antibody) from homodimeric proteins.

[0232] There are several basic mechanisms that can lead to ease of purifying heterodimeric antibodies. For example, modifications to one or both of the antibody heavy chain monomers A and B such that each monomer has a different pI allows for the isoelectric purification of heterodimeric A-B antibody from monomeric A-A and B-B proteins. Alternatively, some scaffold formats, such as the “1+1 Fab-scFv-Fc” format and the “2+1 Fab₂-scFv-Fc” format, also allows separation on the basis of size. As described above, it is also possible to “skew” the formation of heterodimers over homodimers using skew variants. Thus, a combination of heterodimerization skew variants and pI variants find particular use in the heterodimeric antibodies provided herein.

[0233] Additionally, as more fully outlined below, depending on the format of the heterodimeric antibody, pI variants either contained within the constant region and/or Fc domains of a monomer, and/or domain linkers can be used. In some embodiments, the heterodimeric antibody includes additional modifications for alternative functionalities that can also create pI changes, such as Fc, FcRn and KO variants.

[0234] In some embodiments, the subject heterodimeric antibodies provided herein include at least one monomer with one or more modifications that alter the pI of the monomer (i.e., a “pI variant”). In general, as will be appreciated by those in the art, there are two general categories of pI variants: those that increase the pI of the protein (basic changes) and those that decrease the pI of the protein (acidic changes). As described herein, all combinations of these variants can be done: one monomer may be wild type, or a variant that does not display a significantly different pI from wild-type, and the other can be either more basic or more acidic. Alternatively, each monomer is changed, one to more basic and one to more acidic.

[0235] Depending on the format of the heterodimer antibody, pI variants can be either contained within the constant and/or Fc domains of a monomer, or charged linkers, either domain linkers or scFv linkers, can be used. That is, antibody formats that utilize scFv(s) such as “1+1 Fab-scFv-Fc”, format can include charged scFv linkers (either positive or negative), that give a further pI boost for purification purposes. As will be appreciated by those in the art, some 1+1 Fab-scFv-Fc formats are useful with just charged scFv linkers and no additional pI adjustments, although the antibodies described herein do provide pI variants that are on one or both of the monomers, and/or charged domain linkers as well. In addition, additional amino acid engineering for alternative functionalities may also confer pI changes, such as Fc, FcRn and KO variants.

[0236] In subject heterodimeric antibodies that utilizes pI as a separation mechanism to allow the purification of heterodimeric proteins, amino acid variants are introduced into one or both of the monomer polypeptides. That is, the pI of one of the monomers (referred to herein for simplicity as “monomer A”) can be engineered away from monomer B, or both monomer A and B change be changed, with the pI of monomer A increasing and the pI of monomer B decreasing. As is outlined more fully below, the pI changes of either or both monomers can be done by removing or adding a charged residue (e.g., a neutral amino acid is replaced by a positively or negatively charged amino acid residue, e.g., glycine to glutamic acid), changing a charged residue from positive or negative to the opposite charge (aspartic acid to lysine) or changing a charged residue to a neutral residue (e.g., loss of a charge; lysine to serine.). A number of these variants are shown in the FIGS. 3 and 4.

[0237] Thus, in some embodiments, the subject heterodimeric antibody includes amino acid modifications in the constant regions that alter the isoelectric point (pI) of at least one, if not both, of the monomers of a dimeric protein to form “pI antibodies”) by incorporating amino acid substitutions (“pI variants” or “pI substitutions”) into one or both of the monomers. As shown herein, the separation of the heterodimers from the two homodimers can be accomplished if the pIs of the two monomers differ by as little as 0.1 pH unit, with 0.2, 0.3, 0.4 and 0.5 or greater all finding use in the antibodies described herein.

[0238] As will be appreciated by those in the art, the number of pI variants to be included on each or both monomer(s) to get good separation will depend in part on the starting pI of the components, for example in the 1+1 Fab-scFv-Fc and 2+1 Fab₂-scFv-Fc formats, the starting pI of the scFv and Fab(s) of interest. That is, to determine which monomer to engineer or in which “direction” (e.g., more positive or more negative), the Fv sequences of the two target antigens are calculated and a decision is made from there. As is known in the art, different Fvs will have different starting pIs which are exploited in the antibodies described herein. In general, as outlined herein, the pIs are engineered to result in a total pI difference of each monomer of at least about 0.1 logs, with 0.2 to 0.5 being preferred as outlined herein.

[0239] In the case where pI variants are used to achieve heterodimerization, by using the constant region(s) of the heavy chain(s), a more modular approach to designing and purifying bispecific proteins, including antibodies, is provided. Thus, in some embodiments, heterodimerization variants (including skew and pI heterodimerization variants) are not included in the variable regions, such that each individual antibody must be engineered. In addition, in some embodiments, the possibility of immunogenicity resulting from the pI variants is significantly reduced by importing pI variants from different IgG isotypes such that pI is changed without introducing significant immunogenicity. Thus, an additional problem to be solved is the elucidation of low pI constant domains with high human sequence content, e.g., the minimization or avoidance of non-human residues at any particular position. Alternatively or in addition to isotypic substitutions, the possibility of immunogenicity resulting from the pI variants is significantly reduced by utilizing isosteric substitutions (e.g. Asn to Asp; and Gln to Glu).

[0240] As discussed below, a side benefit that can occur with this pI engineering is also the extension of serum half-life and increased FcRn binding. That is, as described in US Publ. App. No. US 2012/0028304 (incorporated by reference in its entirety), lowering the pI of antibody constant domains (including those found in antibodies and Fc fusions) can lead to longer serum retention in vivo. These pI variants for increased serum half-life also facilitate pI changes for purification.

[0241] In addition, it should be noted that the pI variants give an additional benefit for the analytics and quality control process of bispecific antibodies, as the ability to either eliminate, minimize and distinguish when homodimers are present is significant. Similarly, the ability to reliably test the reproducibility of the heterodimeric antibody production is important.

[0242] In general, embodiments of particular use rely on sets of variants that include skew variants, which encourage heterodimerization formation over homodimerization formation, coupled with pI variants, which increase the pI difference between the two monomers to facilitate purification of heterodimers away from homodimers.

[0243] Exemplary combinations of pI variants are shown in FIGS. 4 and 5, and FIG. 30 of US Publ. App. No. 2016/0355608, all of which are herein incorporated by reference in its entirety and specifically for the disclosure of pI variants. Preferred combinations of pI variants are shown in FIGS. 1 and 2. As outlined herein and shown in the figures, these changes are shown relative to IgG1, but all isotypes can be altered this way, as well as isotype hybrids. In the case where the heavy chain constant domain is from IgG2-4, R133E and R133Q can also be used.

[0244] In one embodiment, a preferred combination of pI variants has one monomer (the negative Fab side) comprising 208D/295E/384D/418E/421D variants (N208D/Q295E/N384D/Q418E/N421D when relative to human IgG1) and a second monomer (the positive scFv side) comprising a positively charged scFv linker, including (GKPGS)₄ (SEQ ID NO: 1). However, as will be appreciated by those in the art, the first monomer includes a CH1 domain, including position 208. Accordingly, in constructs that do not include a CH1 domain (for example for antibodies that do not utilize a CH1 domain on one of the domains), a preferred negative pI variant Fc set includes 295E/384D/418E/421D variants (Q295E/N384D/Q418E/N421D when relative to human IgG1).

[0245] Accordingly, in some embodiments, one monomer has a set of substitutions from FIG. 2 and the other monomer has a charged linker (either in the form of a charged scFv linker because that monomer comprises an scFv or a charged domain linker, as the format dictates, which can be selected from those depicted in FIG. 5).

[0246] In some embodiments, modifications are made in the hinge of the Fc domain, including positions 216, 217, 218, 219, 220, 221, 222, 223, 224, 225, 226, 227, 228, 229, and 230 based on EU numbering. Thus, pI mutations and particularly substitutions can be made in one or more of positions 216-230, with 1, 2, 3, 4 or 5 mutations finding use. Again, all possible combinations are contemplated, alone or with other pI variants in other domains.

[0247] Specific substitutions that find use in lowering the pI of hinge domains include, but are not limited to, a deletion at position 221, a non-native valine or threonine at position 222, a deletion at position 223, a non-native glutamic acid at position 224, a deletion at position 225, a deletion at position 235 and a deletion or a non-native alanine at position 236. In some cases, only pI substitutions are done in the hinge domain, and in others, these substitution(s) are added to other pI variants in other domains in any combination.

[0248] In some embodiments, mutations can be made in the CH2 region, including positions 233, 234, 235, 236, 274, 296, 300, 309, 320, 322, 326, 327, 334 and 339, based on EU numbering. It should be noted that changes in 233-236 can be made to increase effector function (along with 327A) in the IgG2 backbone. Again, all possible combinations of these 14 positions can be made; e.g., =may include a variant Fc domain with 1, 2, 3, 4, 5, 6, 7, 8, 9 or 10 CH2 pI substitutions.

[0249] Specific substitutions that find use in lowering the pI of CH2 domains include, but are not limited to, a non-native glutamine or glutamic acid at position 274, a non-native phenylalanine at position 296, a non-native phenylalanine at position 300, a non-native valine at position 309, a non-native glutamic acid at position 320, a non-native glutamic acid at position 322, a non-native glutamic acid at position 326, a non-native glycine at position 327, a non-native glutamic acid at position 334, a non-native threonine at position 339, and all possible combinations within CH2 and with other domains.

[0250] In this embodiment, the modifications can be independently and optionally selected from position 355, 359, 362, 384, 389,392, 397, 418, 419, 444 and 447 (EU numbering) of the CH3 region. Specific substitutions that find use in lowering the pI of CH3 domains include, but are not limited to, a non-native glutamine or glutamic acid at position 355, a non-native serine at position 384, a non-native asparagine or glutamic acid at position 392, a non-native methionine at position 397, a non-native glutamic acid at position 419, a non-native glutamic acid at position 359, a non-native glutamic acid at position 362, a non-native glutamic acid at position 389, a non-native glutamic acid at position 418, a non-native glutamic acid at position 444, and a deletion or non-native aspartic acid at position 447.

[0251] In general, as will be appreciated by those in the art, there are two general categories of pI variants: those that increase the pI of the protein (basic changes) and those that decrease the pI of the protein (acidic changes). As described herein, all combinations of these variants can be done: one monomer may be wild type, or a variant that does not display a significantly different pI from wild-type, and the other can be either more basic or more acidic. Alternatively, each monomer is changed, one to more basic and one to more acidic.

[0252] Preferred combinations of pI variants are shown in FIG. 4. As outlined herein and shown in the figures, these changes are shown relative to IgG1, but all isotypes can be altered this way, as well as isotype hybrids. In the case where the heavy chain constant domain is from IgG2-4, R133E and R133Q can also be used.

[0253] In one embodiment, for example in the FIGS. 22A and 22B formats, a preferred combination of pI variants has one monomer (the negative Fab side) comprising 208D/295E/384D/418E/421D variants (N208D/Q295E/N384D/Q418E/N421D when relative to human IgG1) and a second monomer (the positive scFv side) comprising a positively charged scFv linker, including (GKPGS)₄ (SEQ ID NO: 1). However, as will be appreciated by those in the art, the first monomer includes a CH1 domain, including position 208. Accordingly, in constructs that do not include a CH1 domain (for example for antibodies that do not utilize a CH1 domain on one of the domains, for example in a dual scFv format or a “one armed” format such as those depicted in FIG. 43B, 43C, or 43D), a preferred negative pI variant Fc set includes 295E/384D/418E/421D variants (Q295E/N384D/Q418E/N421D when relative to human IgG1).

[0254] Accordingly, in some embodiments, one monomer has a set of substitutions from FIG. 4 and the other monomer has a charged linker (either in the form of a charged scFv linker because that monomer comprises an scFv or a charged domain linker, as the format dictates, which can be selected from those depicted in FIG. 5).

[0255] 3. Isotypic Variants

[0256] In addition, many embodiments of the antibodies described herein rely on the “importation” of pI amino acids at particular positions from one IgG isotype into another, thus reducing or eliminating the possibility of unwanted immunogenicity being introduced into the variants. A number of these are shown in FIG. 21 of US Publ. 2014/0370013, hereby incorporated by reference. That is, IgG1 is a common isotype for therapeutic antibodies for a variety of reasons, including high effector function. However, the heavy constant region of IgG1 has a higher pI than that of IgG2 (8.10 versus 7.31). By introducing IgG2 residues at particular positions into the IgG1 backbone, the pI of the resulting monomer is lowered (or increased) and additionally exhibits longer serum half-life. For example, IgG1 has a glycine (pI 5.97) at position 137, and IgG2 has a glutamic acid (pI 3.22); importing the glutamic acid will affect the pI of the resulting protein. As is described below, a number of amino acid substitutions are generally required to significant affect the pI of the variant antibody. However, it should be noted as discussed below that even changes in IgG2 molecules allow for increased serum half-life.

[0257] In other embodiments, non-isotypic amino acid changes are made, either to reduce the overall charge state of the resulting protein (e.g. by changing a higher pI amino acid to a lower pI amino acid), or to allow accommodations in structure for stability, etc. as is more further described below.

[0258] In addition, by pI engineering both the heavy and light constant domains, significant changes in each monomer of the heterodimer can be seen. As discussed herein, having the pIs of the two monomers differ by at least 0.5 can allow separation by ion exchange chromatography or isoelectric focusing, or other methods sensitive to isoelectric point.

[0259] 4. Calculating pI

[0260] The pI of each monomer can depend on the pI of the variant heavy chain constant domain and the pI of the total monomer, including the variant heavy chain constant domain and the fusion partner. Thus, in some embodiments, the change in pI is calculated on the basis of the variant heavy chain constant domain, using the chart in the FIG. 19 of US Pub. 2014/0370013. As discussed herein, which monomer to engineer is generally decided by the inherent pI of the Fv and scaffold regions. Alternatively, the pI of each monomer can be compared.

[0261] 5. pI Variants that Also Confer Better FcRn In Vivo Binding

[0262] In the case where the pI variant decreases the pI of the monomer, they can have the added benefit of improving serum retention in vivo.

[0263] Although still under examination, Fc regions are believed to have longer half-lives in vivo, because binding to FcRn at pH 6 in an endosome sequesters the Fc (Ghetie and Ward, 1997 Immunol Today. 18(12): 592-598, entirely incorporated by reference). The endosomal compartment then recycles the Fc to the cell surface. Once the compartment opens to the extracellular space, the higher pH, 7.4, induces the release of Fc back into the blood. In mice, Dall' Acqua et al. showed that Fc mutants with increased FcRn binding at pH 6 and pH 7.4 actually had reduced serum concentrations and the same half life as wild-type Fc (Dall' Acqua et al. 2002, J. Immunol. 169:5171-5180, entirely incorporated by reference). The increased affinity of Fc for FcRn at pH 7.4 is thought to forbid the release of the Fc back into the blood. Therefore, the Fc mutations that will increase Fc's half-life in vivo will ideally increase FcRn binding at the lower pH while still allowing release of Fc at higher pH. The amino acid histidine changes its charge state in the pH range of 6.0 to 7.4. Therefore, it is not surprising to find His residues at important positions in the Fc/FcRn complex.

[0264] Recently it has been suggested that antibodies with variable regions that have lower isoelectric points may also have longer serum half-lives (Igawa et al., 2010 PEDS. 23(5): 385-392, entirely incorporated by reference). However, the mechanism of this is still poorly understood. Moreover, variable regions differ from antibody to antibody. Constant region variants with reduced pI and extended half-life would provide a more modular approach to improving the pharmacokinetic properties of antibodies, as described herein.

### C. Additional Fc Variants for Additional Functionality

[0265] In addition to the heterodimerization variants discussed above, there are a number of useful Fc amino acid modification that can be made for a variety of reasons, including, but not limited to, altering binding to one or more FcγR receptors, altered binding to FcRn receptors, etc, as discussed below.

[0266] Accordingly, the antibodies provided herein (heterodimeric, as well as homodimeric) can include such amino acid modifications with or without the heterodimerization variants outlined herein (e.g., the pI variants and steric variants). Each set of variants can be independently and optionally included or excluded from any particular heterodimeric protein.

[0267] 1. FcγR Variants

[0268] Accordingly, there are a number of useful Fc substitutions that can be made to alter binding to one or more of the FcγR receptors. In certain embodiments, the subject antibody includes modifications that alter the binding to one or more FcγR receptors (i.e., “FcγR variants”). Substitutions that result in increased binding as well as decreased binding can be useful. For example, it is known that increased binding to FcγRIIIa generally results in increased ADCC (antibody dependent cell-mediated cytotoxicity; the cell-mediated reaction wherein nonspecific cytotoxic cells that express FcγRs recognize bound antibody on a target cell and subsequently cause lysis of the target cell). Similarly, decreased binding to FcγRIIb (an inhibitory receptor) can be beneficial as well in some circumstances. Amino acid substitutions that find use in the antibodies described herein include those listed in U.S. Pat. No. 8,188,321 (particularly FIG. 41) and U.S. Pat. No. 8,084,582, and US Publ. App. Nos. 20060235208 and 20070148170, all of which are expressly incorporated herein by reference in their entirety and specifically for the variants disclosed therein. Particular variants that find use include, but are not limited to, 236A, 239D, 239E, 332E, 332D, 239D/332E, 267D, 267E, 328F, 267E/328F, 236A/332E, 239D/332E/330Y, 239D/332E/330L, 243A, 243L, 264A, 264V and 299T.

[0269] In addition, there are additional Fc substitutions that find use in increased binding to the FcRn receptor and increased serum half-life, as specifically disclosed in U.S. Ser. No. 12/341,769, hereby incorporated by reference in its entirety, including, but not limited to, 434S, 434A, 428L, 308F, 2591, 428L/4345, 2591/308F, 4361/428L, 4361 or V/4345, 436V/428L and 2591/308F/428L. Such modification may be included in one or both Fc domains of the subject antibody.

[0270] 2. Ablation Variants

[0271] Similarly, another category of functional variants are “FcγR ablation variants” or “Fc knock out (FcKO or KO)” variants. In these embodiments, for some therapeutic applications, it is desirable to reduce or remove the normal binding of the Fc domain to one or more or all of the Fcγ receptors (e.g. FcγR1, FcγRIIa, FcγRIIb, FcγRIIIa, etc.) to avoid additional mechanisms of action. That is, for example, in many embodiments, particularly in the use of bispecific antibodies that bind CD3 monovalently it is generally desirable to ablate FcγRIIIa binding to eliminate or significantly reduce ADCC activity. wherein one of the Fc domains comprises one or more Fcγ receptor ablation variants. These ablation variants are depicted in FIG. 14, and each can be independently and optionally included or excluded, with preferred aspects utilizing ablation variants selected from the group consisting of G236R/L328R, E233P/L234V/L235A/G236del/S239K, E233P/L234V/L235A/G236del/S267K, E233P/L234V/L235A/G236del/S239K/A327G, E233P/L234V/L235A/G236del/S267K/A327G and E233P/L234V/L235A/G236del. It should be noted that the ablation variants referenced herein ablate FcγR binding but generally not FcRn binding.

[0272] As is known in the art, the Fc domain of human IgG1 has the highest binding to the Fcγ receptors, and thus ablation variants can be used when the constant domain (or Fc domain) in the backbone of the heterodimeric antibody is IgG1. Alternatively, or in addition to ablation variants in an IgG1 background, mutations at the glycosylation position 297 (generally to A or S) can significantly ablate binding to FcγRIIIa, for example. Human IgG2 and IgG4 have naturally reduced binding to the Fcγ receptors, and thus those backbones can be used with or without the ablation variants.

### D. Combination of Heterodimeric and Fc Variants

[0273] As will be appreciated by those in the art, all of the recited heterodimerization variants (including skew and/or pI variants) can be optionally and independently combined in any way, as long as they retain their “strandedness” or “monomer partition”. In some embodiments, the heterodimeric antibodies provided herein include the combination of heterodimerizaition skew variants, isosteric pI substitutions and FcKO variants as depicted in FIG. 4. In addition, all of these variants can be combined into any of the heterodimerization formats.

[0274] In the case of pI variants, while embodiments finding particular use are shown in the Figures, other combinations can be generated, following the basic rule of altering the pI difference between two monomers to facilitate purification.

[0275] In addition, any of the heterodimerization variants, skew and p1, are also independently and optionally combined with Fc ablation variants, Fc variants, FcRn variants, as generally outlined herein.

[0276] Exemplary combination of variants that are included in some embodiments of the heterodimeric 1+1 Fab-scFv-Fc and 2+1 Fab₂-scFv-Fc format antibodies are included in FIG. 4. In certain embodiments, the antibody is a heterodimeric 1+1 Fab-scFv-Fc or 2+1 Fab₂-scFv-Fc format antibody as shown in FIGS. 15A and 15B.

### E. Anti-MSLN x Anti-CD3 Bispecific Antibodies

[0277] In another aspect, provided herein are anti-MSLN x anti-CD3 (also referred to herein as “αMSLN x αCD3”) bispecific antibodies. Such antibodies include at least one MSLN binding domain and at least one CD3 binding domain. In some embodiments, bispecific αMSLN x αCD3 provided herein immune responses selectively in tumor sites that express MSLN.

[0278] Note that unless specified herein, the order of the antigen list in the name does not confer structure; that is a MSLN x CD3 1+1 Fab-scFv-Fc antibody can have the scFv bind to MSLN or CD3, although in some cases, the order specifies structure as indicated.

[0279] As is more fully outlined herein, these combinations of ABDs can be in a variety of formats, as outlined below, generally in combinations where one ABD is in a Fab format and the other is in an scFv format. Exemplary formats that are used in the bispecific antibodies provided herein include the 1+1 Fab-scFv-Fc and 2+1 Fab2-scFv-Fv formats (see, e.g., FIGS. 22A and 22B). Other useful antibody formats include, but are not limited to, “mAb-Fv,” “mAb-scFv,” “central-Fv”, “one armed scFv-mAb,” “scFv-mAb,” “dual scFv,” and “trident” format antibodies, as disclosed in FIG. 43A-43K.

[0280] In addition, in general, one of the ABDs comprises a scFv as outlined herein, in an orientation from N- to C-terminus of VH-scFv linker-VL or VL-scFv linker-VH. One or both of the other ABDs, according to the format, generally is a Fab, comprising a VH domain on one protein chain (generally as a component of a heavy chain) and a VL on another protein chain (generally as a component of a light chain).

[0281] As will be appreciated by those in the art, any set of 6 CDRs or VH and VL domains can be in the scFv format or in the Fab format, which is then added to the heavy and light constant domains, where the heavy constant domains comprise variants (including within the CH1 domain as well as the Fc domain). The scFv sequences contained in the sequence listing utilize a particular charged linker, but as outlined herein, uncharged or other charged linkers can be used, including those depicted in FIG. 5 and FIG. 6.

[0282] In addition, as discussed above, the numbering used in the Sequence Listing for the identification of the CDRs is Kabat, however, different numbering can be used, which will change the amino acid sequences of the CDRs as shown in Table 2.

[0283] For all of the variable heavy and light domains listed herein, further variants can be made. As outlined herein, in some embodiments the set of 6 CDRs can have from 0, 1, 2, 3, 4 or 5 amino acid modifications (with amino acid substitutions finding particular use), as well as changes in the framework regions of the variable heavy and light domains, as long as the frameworks (excluding the CDRs) retain at least about 80, 85 or 90% identity to a human germline sequence selected from those listed in FIG. 1 of U.S. Pat. No. 7,657,380, which Figure and Legend is incorporated by reference in its entirety herein. Thus, for example, the identical CDRs as described herein can be combined with different framework sequences from human germline sequences, as long as the framework regions retain at least 80, 85 or 90% identity to a human germline sequence selected from those listed in FIG. 1 of U.S. Pat. No. 7,657,380. Alternatively, the CDRs can have amino acid modifications (e.g., from 1, 2, 3, 4 or 5 amino acid modifications in the set of CDRs (that is, the CDRs can be modified as long as the total number of changes in the set of 6 CDRs is less than 6 amino acid modifications, with any combination of CDRs being changed; e.g., there may be one change in vlCDR1, two in vhCDR2, none in vhCDR3, etc.)), as well as having framework region changes, as long as the framework regions retain at least 80, 85 or 90% identity to a human germline sequence selected from those listed in FIG. 1 of U.S. Pat. No. 7,657,380.

[0284] The anti-MSLN x anti-CD3 bispecific antibody can include any suitable CD3 ABD, including those described herein (see, e.g., FIGS. 10A-10F). In some embodiments, the CD3 ABD of the anti-MSLN x anti-CD3 bispecific antibody includes the variable heavy domain and variable light domain of a CD3 ABD provided herein, including those described in FIGS. 10A-10F and the sequence listing. In some embodiments, the CD3 ABD includes the variable heavy domain and variable light domain of one of the following CD3 ABDs: H1.30_L1.47, H1.32_L1.47, H1.89_L1.47, H1.90_L1.47, H1.33_L1.47, H1.31_L1.47, L1.47_H1.30, L1.47_H1.30, L1.47_H1.32, L1.47_H1.89, L1.47_H1.90, L1.47_H1.33, and L1.47_H1.31 (FIGS. 10A-10F). In exemplary embodiments, the CD3 ABD is one of the following CD3 ABDs: H1.30_L1.47, H1.32_L1.47, H1.89_L1.47, H1.90_L1.47, H1.33_L1.47, H1.31_L1.47, L1.47_H1.30, L1.47_H1.30, L1.47_H1.32, L1.47_H1.89, L1.47_H1.90, L1.47_H1.33, and L1.47_H1.31 (FIGS. 10A-10F) or a variant thereof.

[0285] The anti-MSLN x anti-CD3 bispecific antibody can include any suitable MSLN ABD, including those described herein (see, e.g., FIGS. 15-21). In some embodiments, the MSLN ABD of the anti-MSLN x anti-CD3 bispecific antibody includes the variable heavy domain and variable light domain of a MSLN ABD provided herein, including those described in FIGS. 15-21 and the sequence listing. In some embodiments, the MSLN ABD includes the variable heavy domain and variable light domain of one of the following MSLN ABDs: MESO-A[MSLN]_H1.1_L1, MESO-B[MSLN]_H0L0, MESO-C[MSLN]_H1L1, MESO-C[MSLN]_H1.1_L1, MESO-C[MSLN]_H1.2L1, MESO-C[MSLN]_H1.3_L1, MESO-C[MSLN]_H1.4_L1, MESO-C[MSLN]_H1.5_L1, MESO-C[MSLN]_H1.6_L1, MESO-C[MSLN]_H1.7_L1, MESO-C[MSLN]_H1.8_L1, MESO-C[MSLN]_H1.9_L1, MESO-C[MSLN]_H1_L1.1, MESO-C[MSLN]_H1_L1.2, MESO-C[MSLN]_H1_L1.3, MESO-C[MSLN]_H1_L1.4, MESO-C[MSLN]_H1_L1.5, MESO-C[MSLN]_H1_L1.6, MESO-C[MSLN]_H1_L1.7, MESO-C[MSLN]_H1_L1.8, MESO-C[MSLN]_H1_L1.9, MESO-C[MSLN]_H1_L1.10, MESO-C[MSLN]_H1.5_L1.3, MESO-C[MSLN]_H1.6_L1.3, MESO-C[MSLN]_H1.12_L1.9, MESO-C[MSLN]_H1.13_L1.9, MESO-C[MSLN]_H1.3_L1.13, MESO-C[MSLN]_H1.3_L1.14, MESO-C[MSLN]_H1.3_L1.15, MESO-C[MSLN]_H1.3_L1.16, MESO-C[MSLN]_H1.3_L1.17, MESO-C[MSLN]_H1.3_L1.18, MESO-C[MSLN]_H1.3_L1.9, MESO-C[MSLN]_H1.3_L1.5, MESO-C[MSLN]_H1_L1.20, MESO-C[MSLN]_H1.12_L1.20, MESO-C[MSLN]_H1.14_L1.14, MESO-C[MSLN]_H1.15_L1.14, MESO-C[MSLN]_H1.16_L1.14, MESO-C[MSLN]_H1_L1.19, MESO-C[MSLN]_H1_L1.21, MESO-C[MSLN]_H1_L1.22, MESO-C[MSLN]_H1.12_L1.19, MESO-C[MSLN]_H1.12_L1.21, MESO-C[MSLN]_H1.12_L1.22, and MESO-C[MSLN]_H1.12_L1.9 (FIGS. 15-21).

[0286] In exemplary embodiments, the MSLN ABD is one of the following MSLN ABDs: MESO-A[MSLN]_H1.1_L1, MESO-B[MSLN]_H0L0, MESO-C[MSLN]_H1L1, MESO-C[MSLN]_H1.1_L1, MESO-C[MSLN]_H1.2L1, MESO-C[MSLN]_H1.3_L1, MESO-C[MSLN]_H1.4_L1, MESO-C[MSLN]_H1.5_L1, MESO-C[MSLN]_H1.6_L1, MESO-C[MSLN]_H1.7_L1, MESO-C[MSLN]_H1.8_L1, MESO-C[MSLN]_H1.9_L1, MESO-C[MSLN]_H1_L1.1, MESO-C[MSLN]_H1_L1.2, MESO-C[MSLN]_H1_L1.3, MESO-C[MSLN]_H1_L1.4, MESO-C[MSLN]_H1_L1.5, MESO-C[MSLN]_H1_L1.6, MESO-C[MSLN]_H1_L1.7, MESO-C[MSLN]_H1_L1.8, MESO-C[MSLN]_H1_L1.9, MESO-C[MSLN]_H1_L1.10, MESO-C[MSLN]_H1.5_L1.3, MESO-C[MSLN]_H1.6_L1.3, MESO-C[MSLN]_H1.12_L1.9, MESO-C[MSLN]_H1.13_L1.9, MESO-C[MSLN]_H1.3_L1.13, MESO-C[MSLN]_H1.3_L1.14, MESO-C[MSLN]_H1.3_L1.15, MESO-C[MSLN]_H1.3_L1.16, MESO-C[MSLN]_H1.3_L1.17, MESO-C[MSLN]_H1.3_L1.18, MESO-C[MSLN]_H1.3_L1.9, MESO-C[MSLN]_H1.3_L1.5, MESO-C[MSLN]_H1_L1.20, MESO-C[MSLN]_H1.12_L1.20,MESO-C[MSLN]_H1.14_L1.14, MESO-C[MSLN]_H1.15_L1.14, MESO-C[MSLN]_H1.16_L1.14, MESO-C[MSLN]_H1_L1.19, MESO-C[MSLN]_H1_L1.21, MESO-C[MSLN]_H1_L1.22, MESO-C[MSLN]_H1.12_L1.19, MESO-C[MSLN]_H1.12_L1.21, MESO-C[MSLN]_H1.12_L1.22, and MESO-C[MSLN]_H1.12_L1.9 (FIGS. 15-21) or variants thereof.

[0287] In some embodiments, the anti-MSLN x anti-CD3 bispecific antibody includes a MSLN binding domain variable heavy domain selected from any of FIGS. 15-18 and 20-21. In some embodiments, the MSLN binding domain includes a MSLN binding domain variable light domain selected from any of FIGS. 15-17 and 19-21. In some embodiments, the MSLN binding domain includes a combination of any of the MSLN binding domain variable heavy domains and variable light domains in FIGS. 15-21.

### F. Useful Formats of the Invention

[0288] As will be appreciated by those in the art and discussed more fully below, the heterodimeric bispecific antibodies provided herein can take on a wide variety of configurations, as are generally depicted in FIG. 1. Some figures depict “single ended” configurations, where there is one type of specificity on one “arm” of the molecule and a different specificity on the other “arm”. Other figures depict “dual ended” configurations, where there is at least one type of specificity at the “top” of the molecule and one or more different specificities at the “bottom” of the molecule. Thus, in some embodiments, the antibodies described herein are directed to novel immunoglobulin compositions that co-engage a different first and a second antigen.

[0289] As will be appreciated by those in the art, the heterodimeric formats of the antibodies described herein can have different valencies as well as be bispecific. That is, heterodimeric antibodies of the antibodies described herein can be bivalent and bispecific, wherein one target tumor antigen (e.g. CD3) is bound by one binding domain and the other target tumor antigen (e.g. MSLN) is bound by a second binding domain. The heterodimeric antibodies can also be trivalent and bispecific, wherein the first antigen is bound by two binding domains and the second antigen by a second binding domain. As is outlined herein, when CD3 is one of the target antigens, it is preferable that the CD3 is bound only monovalently, to reduce potential side effects.

[0290] The antibodies described herein utilize anti-CD3 antigen binding domains in combination with anti-MSLN binding domains. As will be appreciated by those in the art, any collection of anti-CD3 CDRs, anti-CD3 variable light and variable heavy domains, Fabs and scFvs as depicted in any of the Figures can be used. Similarly, any of the anti-MSLN antigen binding domains can be used, whether CDRs, variable light and variable heavy domains, Fabs and scFvs as depicted in any of the Figures (e.g., FIGS. 15-21) can be used, optionally and independently combined in any combination.

[0291] 1. 1+1 Fab-scFv-Fc Format

[0292] One heterodimeric scaffold that finds particular use in the antibodies described herein is the “1+1 Fab-scFv-Fc” or “bottle-opener” format as shown in FIG. 15A with an exemplary combination of a CD3 binding domain and a tumor target antigen (MSLN) binding domain. In this embodiment, one heavy chain monomer of the antibody contains a single chain Fv (“scFv”, as defined below) and an Fc domain. The scFv includes a variable heavy domain (VH1) and a variable light domain (VL1), wherein the VH1 is attached to the VL1 using an scFv linker that can be charged (see, e.g., FIG. 5). The scFv is attached to the heavy chain using a domain linker (see, e.g., FIG. 6). The other heavy chain monomer is a “regular” heavy chain (VH-CH1-hinge-CH2-CH3). The 1+1 Fab-scFv-Fc also includes a light chain that interacts with the VH-CH1 to form a Fab. This structure is sometimes referred to herein as the “bottle-opener” format, due to a rough visual similarity to a bottle-opener. The two heavy chain monomers are brought together by the use of amino acid variants (e.g., heterodimerization variants, discussed above) in the constant regions (e.g., the Fc domain, the CHI domain and/or the hinge region) that promote the formation of heterodimeric antibodies as is described more fully below.

[0293] There are several distinct advantages to the present “1+1 Fab-scFv-Fc” format. As is known in the art, antibody analogs relying on two scFv constructs often have stability and aggregation problems, which can be alleviated in the antibodies described herein by the addition of a “regular” heavy and light chain pairing. In addition, as opposed to formats that rely on two heavy chains and two light chains, there is no issue with the incorrect pairing of heavy and light chains (e.g. heavy 1 pairing with light 2, etc.).

[0294] Many of the embodiments outlined herein rely in general on the 1+1 Fab-scFv-Fc or “bottle opener” format antibody that comprises a first monomer comprising an scFv, comprising a variable heavy and a variable light domain, covalently attached using an scFv linker (charged, in many but not all instances), where the scFv is covalently attached to the N-terminus of a first Fc domain usually through a domain linker The domain linker can be either charged or uncharged and exogenous or endogenous (e.g., all or part of the native hinge domain). Any suitable linker can be used to attach the scFv to the N-terminus of the first Fc domain. In some embodiments, the domain linker is chosen from the domain linkers in FIG. 6. The second monomer of the 1+1 Fab-scFv-Fc format or “bottle opener” format is a heavy chain, and the composition further comprises a light chain.

[0295] In general, in many preferred embodiments, the scFv is the domain that binds to the CD3, and the Fab forms a MSLN binding domain. An exemplary anti-MSLN x anti-CD3 bispecific antibody in the 1+1 Fab-scFv-Fc format is depicted in FIG. 22A. Exemplary anti-MSLN x anti-CD3 bispecific antibody in the 1+1 Fab-scFv-Fc format is depicted in FIGS. 23A-23R, FIGS. 24A-24B, FIGS. 25A-25B, FIG. 26, and FIG. 27.

[0296] In addition, the Fc domains of the antibodies described herein generally include skew variants (e.g. a set of amino acid substitutions as shown in FIGS. 1 and 4, with particularly useful skew variants being selected from the group consisting of S364K/E357Q:L368D/K370S; L368D/K370S:S364K; L368E/K370S:S364K; T411T/E360E/Q362E:D401K; L368D/K370S:S364K/E357L; K370S:S364K/E357Q; T366S/L368A/Y407V:T366W and T366S/L368A/Y407V/Y349C:T366W/S354C), optionally ablation variants (including those shown in FIG. 3), optionally charged scFv linkers (including those shown in FIG. 5) and the heavy chain comprises pI variants (including those shown in FIG. 4).

[0297] In certain embodiments, the 1+1 Fab-scFv-Fc scaffold format includes a first monomer that includes a scFv-domain linker-CH2-CH3 monomer, a second monomer that includes a first variable heavy domain-CH1-hinge-CH2-CH3 monomer and a third monomer that includes a first variable light domain. In some embodiments, the CH2-CH3 of the first monomer is a first variant Fc domain and the CH2-CH3 of the second monomer is a second variant Fc domain. In some embodiments, the scFv includes a scFv variable heavy domain and a scFv variable light domain that form a CD3 binding moiety. In certain embodiments, the scFv variable heavy domain and scFv variable light domain are covalently attached using an scFv linker (charged, in many but not all instances. See, e.g., FIG. 5). In some embodiments, the first variable heavy domain and first variable light domain form a MSLN binding domain. In some embodiments, the 1+1 Fab-scFv-Fc format includes skew variants, pI variants, and ablation variants. Accordingly, some embodiments include 1+1 Fab-scFv-Fc formats that comprise: a) a first monomer (the “scFv monomer”) that comprises a charged scFv linker (with the +H sequence of FIG. 5 being preferred in some embodiments), the skew variants S364K/E357Q, the ablation variants E233P/L234V/L235A/G236del/S267K, and an scFv that binds to CD3 as outlined herein; b) a second monomer (the “Fab monomer”) that comprises the skew variants L368D/K370S, the pI variants N208D/Q295E/N384D/Q418E/N421D, the ablation variants E233P/L234V/L235A/G236del/S267K, and a variable heavy domain; and c) a light chain that includes a variable light domain light domain (VL) and a constant light domain (CL), wherein numbering is according to EU numbering. The variable heavy domain and variable light domain make up a MSLN binding moiety. CD3 binding domain sequences finding particular use in these embodiments include, but are not limited to, H1.30_L1.47, H1.32_L1.47, H1.89_L1.47, H1.90_L1.47, H1.33_L1.47, H1.31_L1.47, L1.47_H1.30, L1.47_H1.30, L1.47_H1.32, L1.47_H1.89, L1.47_H1.90, L1.47_H1.33, and L1.47_H1.31 as well as those depicted in FIGS. 10A-10F. In some embodiments, the MSLN binding domains include the variable heavy and variable light domain of any one of the MSLN binding domains disclosed in FIGS. 15-21. MSLN binding domain sequences that are of particular use in these embodiments include, but are not limited to: MESO-A[MSLN]_H1.1_L1, MESO-B[MSLN]_H0L0, MESO-C[MSLN]_H1L1, MESO-C[MSLN]_H1.1_L1, MESO-C[MSLN]_H1.2L1, MESO-C[MSLN]_H1.3_L1, MESO-C[MSLN]_H1.4_L1, MESO-C[MSLN]_H1.5_L1, MESO-C[MSLN]_H1.6_L1, MESO-C[MSLN]_H1.7_L1, MESO-C[MSLN]_H1.8_L1, MESO-C[MSLN]_H1.9_L1, MESO-C[MSLN]_H1_L1.1, MESO-C[MSLN]_H1_L1.2, MESO-C[MSLN]_H1_L1.3, MESO-C[MSLN]_H1_L1.4, MESO-C[MSLN]_H1_L1.5, MESO-C[MSLN]_H1_L1.6, MESO-C[MSLN]_H1_L1.7, MESO-C[MSLN]_H1_L1.8, MESO-C[MSLN]_H1_L1.9, MESO-C[MSLN]_H1_L1.10, MESO-C[MSLN]_H1.5_L1.3, MESO-C[MSLN]_H1.6_L1.3, MESO-C[MSLN]_H1.12_L1.9, MESO-C[MSLN]_H1.13_L1.9, MESO-C[MSLN]_H1.3_L1.13, MESO-C[MSLN]_H1.3_L1.14, MESO-C[MSLN]_H1.3_L1.15, MESO-C[MSLN]_H1.3_L1.16, MESO-C[MSLN]_H1.3_L1.17, MESO-C[MSLN]_H1.3_L1.18, MESO-C[MSLN]_H1.3_L1.9, MESO-C[MSLN]_H1.3_L1.5, MESO-C[MSLN]_H1_L1.20, MESO-C[MSLN]_H1.12_L1.20,MESO-C[MSLN]_H1.14_L1.14, MESO-C[MSLN]_H1.15_L1.14, MESO-C[MSLN]_H1.16_L1.14, MESO-C[MSLN]_H1_L1.19, MESO-C[MSLN]_H1_L1.21, MESO-C[MSLN]_H1_L1.22, MESO-C[MSLN]_H1.12_L1.19, MESO-C[MSLN]_H1.12_L1.21, MESO-C[MSLN]_H1.12_L1.22, and MESO-C[MSLN]_H1.12_L1.9 (FIGS. 15-21).

[0298] Particularly useful MSLN and CD3 sequence combinations for use with the 1+1 Fab_{z}-scFv-Fc format antibody include, for example, MESO-A[MSLN]_H1.1_L1 x CD3 H1.30 L1.47, MESO-B[MSLN]_H0L0 x CD3 H1.30 L1.47, MESO-C[MSLN]_H1L1_x CD3 H1.30 L1.47, MESO-C[MSLN]_H1.1_L1 x CD3 H1.30 L1.47, MESO-C[MSLN]_H1.2_L1 x CD3 H1.30 L1.47, MESO-C[MSLN]_H1.3_L1_x CD3_H1.30 L1.47, MESO-C[MSLN]_H1.4_L1 x CD3 H1.30 L1.47, MESO-C[MSLN]_H1.5_L1 x CD3 H1.30 L1.47, MESO-C[MSLN]_H1.6_L1 x CD3 H1.30 L1.47, MESO-C[MSLN]_H1.7_L1 x CD3 H1.30 L1.47, MESO-C[MSLN]_H1.8_L1 x CD3 H1.30 L1.47, MESO-C[MSLN]_H1.9_L1 x CD3 H1.30 L1.47, MESO-C[MSLN]_H1_L1.1 x CD3_H1.30 L1.47, MESO-C[MSLN]_H1_L1.2 x CD3_H1.30 L1.47, MESO-C[MSLN]_H1_L1.3 x CD3_H1.30 L1.47, MESO-C[MSLN]_H1_L1.4_x CD3 H.130 L1.47, MESO-C[MSLN]_H1_L1.5 x CD3 H1.30 L1.47, MESO-C[MSLN]_H1_L1.6_x CD3 H1.30 L1.47, MESO-C[MSLN]_H1_L1.7 x CD3 H1.30 L1.47, MESO-C[MSLN]_H1_L1.8 x CD3 H1.30 L1.47, MESO-C[MSLN]_H1_L1.9 x CD3 H1.30 L1.47, MESO-C[MSLN]_H1_L1.10 x CD3 H1.30 L1.47, MESO-C[MSLN]_H1.5_L1.3 x CD3 H1.30 L1.47, MESO-C[MSLN]_H1.6_L1.3 x CD3 H.130 L1.47, MESO-C[MSLN]_H1.12_L1.9 x CD3 H1.30 L1.47, MESO-C[MSLN]_H1.13_L1.9 x CD3 H1.30 L1.47, MESO-C[MSLN]_H1.3_L1.13 x CD3 H1.30 L1.47, MESO-C[MSLN]_H1.3_L1.14 x CD3 H1.30 L1.47, MESO-C[MSLN]_H1.3_L1.15 x CD3 H1.30 L1.47, MESO-C[MSLN]_H1.3_L1.16 x CD3 H1.30 L1.47, MESO-C[MSLN]_H1.3_L1.17 x CD3 H1.30 L1.47, MESO-C[MSLN]_H1.3_L1.18 x CD3 H1.30 L1.47, MESO-C[MSLN]_H1.3_L1.9 x CD3 H1.30 L1.47, MESO-C[MSLN]_H1.3_L1.5 x CD3 H1.30 L1.47, MESO-C[MSLN]_H1_L1.20 x CD3 H1.30 L1.47, MESO-C[MSLN]_H1.12_L1.20 x CD3 H1.30 L1.47, MESO-A[MSLN]_H1.1_L1 x CD3 H1.32 L1.47, MESO-B[MSLN]_H0L0 x CD3 H1.32 L1.47, MESO-C[MSLN]_H1L1 x CD3 H1.32 L1.47, MESO-C[MSLN]_H1.14_L1.14 x CD3 L1.47 H1.32, MESO-C[MSLN]_H1.15_L1.14 x CD3_L1.47 H1.32, MESO-C[MSLN]_H1.16_L1.14 x CD3 L1.47 H1.32, MESO-A[MSLN]_H1.1_L1 x CD3 H1.33 L1.47, MESO-B[MSLN]_H0L0 x CD3 H1.33 L1.47, MESO-A[MSLN]_H1.1_L1 x CD3 H1.31 L1.47, and MESO-B[MSLN]_H0L0 x CD3 H1.31 L1.47 (FIGS. 23A-27).

[0299] Exemplary variable heavy and light domains of the scFv that binds to CD3 are included in FIG. 10A-10F. Exemplary variable heavy and light domains of the Fv that binds to MSLN are included in FIGS. 15-21. In some embodiments, the MSLN binding domains include the variable heavy and variable light domain of any one of the MSLN binding domains disclosed in FIGS. 15-21. In an exemplary embodiment, the MSLN binding domain of the 1+1 Fab-scFv-Fc MSLN x CD3 bispecific antibody includes the VH and VL of one of the following MSLN binding domains: MESO-A[MSLN]_H1.1_L1, MESO-B[MSLN]_H0L0, MESO-C[MSLN]_H1L1, MESO-C[MSLN]_H1.1_L1, MESO-C[MSLN]_H1.2L1, MESO-C[MSLN]_H1.3_L1, MESO-C[MSLN]_H1.4_L1, MESO-C[MSLN]_H1.5_L1, MESO-C[MSLN]_H1.6_L1, MESO-C[MSLN]_H1.7_L1, MESO-C[MSLN]_H1.8_L1, MESO-C[MSLN]_H1.9_L1, MESO-C[MSLN]_H1_L1.1, MESO-C[MSLN]_H1_L1.2, MESO-C[MSLN]_H1_L1.3, MESO-C[MSLN]_H1_L1.4, MESO-C[MSLN]_H1_L1.5, MESO-C[MSLN]_H1_L1.6, MESO-C[MSLN]_H1_L1.7, MESO-C[MSLN]_H1_L1.8, MESO-C[MSLN]_H1_L1.9, MESO-C[MSLN]_H1_L1.10, MESO-C[MSLN]_H1.5_L1.3, MESO-C[MSLN]_H1.6_L1.3, MESO-C[MSLN]_H1.12_L1.9, MESO-C[MSLN]_H1.13_L1.9, MESO-C[MSLN]_H1.3_L1.13, MESO-C[MSLN]_H1.3_L1.14, MESO-C[MSLN]_H1.3_L1.15, MESO-C[MSLN]_H1.3_L1.16, MESO-C[MSLN]_H1.3_L1.17, MESO-C[MSLN]_H1.3_L1.18, MESO-C[MSLN]_H1.3_L1.9, MESO-C[MSLN]_H1.3_L1.5, MESO-C[MSLN]_H1_L1.20, MESO-C[MSLN]_H1.12_L1.20,_MESO-C[MSLN]_H1.14_L1.14, MESO-C[MSLN]_H1.15_L1.14, MESO-C[MSLN]_H1.16_L1.14, MESO-C[MSLN]_H1_L1.19, MESO-C[MSLN]_H1_L1.21, MESO-C[MSLN]_H1_L1.22, MESO-C[MSLN]_H1.12_L1.19, MESO-C[MSLN]_H1.12_L1.21, MESO-C[MSLN]_H1.12_L1.22, and MESO-C[MSLN]_H1.12_L1.9 (FIGS. 15-21). In one embodiment, the CD3 binding domain of the 1+1 Fab-scFv-Fc MSLN x CD3 bispecific antibody includes the VH and VL of one of the following CD3 binding domains: H1.30 L1.47, H1.32_L1.47, H1.89_L1.47, H1.90_L1.47, H1.33_L1.47, H1.31_L1.47, L1.47_H1.30, L1.47_H1.30, L1.47_H1.32, L1.47_H1.89, L1.47_H1.90, L1.47_H1.33, and L1.47_H1.31 (FIGS. 10A-10F). Particularly useful MSLN and CD3 combinations for use in the 1+1 Fab-scFv-Fc MSLN x CD3 bispecific antibody format are disclosed in FIGS. 23A-27 and include: MESO-A[MSLN]_H1.1_L1 x CD3 H1.30 L1.47, MESO-B[MSLN]_H0L0 x CD 3 H1.30 L1.47, MESO-C[MSLN]_H1L1_x CD3 H1.30 L1.47, MESO-C[MSLN]_H1.1_L1 x CD 3 H1.30 L1.47, MESO-C[MSLN]_H1.2_L1 x CD 3 H1.30 L1.47, MESO-C[MSLN]_H1.3_L1_x CD 3 H1.30 L1.47, MESO-C[MSLN]_H1.4_L1 x CD 3 H1.30 L1.47, MESO-C[MSLN]_H1.5_L1 x CD 3 H1.30 L1.47, MESO-C[MSLN]_H1.6_L1 x CD 3 H1.30 L1.47, MESO-C[MSLN]_H1.7_L1 x CD 3 H1.30 L1.47, MESO-C[MSLN]_H1.8_L1 x CD 3 H1.30 L1.47, MESO-C[MSLN]_H1.9_L1 x CD3 H1.30 L1.47, MESO-C[MSLN]_H1_L1.1 x CD 3 H1.30 L1.47, MESO-C[MSLN]_H1_L1.2 x CD 3 H1.30 L1.47, MESO-C[MSLN]_H1_L1.3 x CD 3 H1.30 L1.47, MESO-C[MSLN]_H1_L1.4 x CD3 H.130 L1.47, MESO-C[MSLN]_H1_L1.5 x CD 3 H1.30 L1.47, MESO-C[MSLN]_H1_L1.6 x CD 3 H1.30 L1.47, MESO-C[MSLN]_H1_L1.7 x CD 3 H1.30 L1.47, MESO-C[MSLN]_H1_L1.8 x CD 3 H1.30 L1.47, MESO-C[MSLN]_H1_L1.9 x CD3 H1.30 L1.47, MESO-C[MSLN]_H1_L1.10 x CD 3 H1.30 L1.47, MESO-C[MSLN]_H1.5_L1.3 x CD 3 H1.30 L1.47, MESO-C[MSLN]_H1.6_L1.3 x CD3 H.130 L1.47, MESO-C[MSLN]_H1.12_L1.9 x CD 3 H1.30 L1.47, MESO-C[MSLN]_H1.13_L1.9 x CD 3 H1.30 L1.47, MESO-C[MSLN]_H1.3_L1.13 x CD 3 H1.30 L1.47, MESO-C[MSLN]_H1.3_L1.14 x CD 3 H1.30 L1.47, MESO-C[MSLN]_H1.3_L1.15 x CD 3 H1.30 L1.47, MESO-C[MSLN]_H1.3_L1.16 x CD 3 H1.30 L1.47, MESO-C[MSLN]_H1.3_L1.17 x CD 3 H1.30 L1.47, MESO-C[MSLN]_H1.3_L1.18 x CD 3 H1.30 L1.47, MESO-C[MSLN]_H1.3_L1.9 x CD 3 H1.30 L1.47, MESO-C[MSLN]_H1.3_L1.5 x CD 3 H1.30 L1.47, MESO-C[MSLN]_H1_L1.20 x CD 3 H1.30 L1.47, MESO-C[MSLN]_H1.12_L1.20 x CD 3 H1.30 L1.47, MESO-A[MSLN]_H1.1_L1 x CD 3 H1.32 L1.47, MESO-B[MSLN]_H0L0 x CD 3 H1.32 L1.47, MESO-C[MSLN]_H1L1 x CD 3 H1.32 L1.47, MESO-C[MSLN]_H1.14_L1.14 x CD3 L1.47 H1.32, MESO-C[MSLN]_H1.15_L1.14 x CD3 L1.47 H1.32, MESO-C[MSLN]_H1.16_L1.14 x CD3 L1.47 H1.32, MESO-A[MSLN]_H1.1_L1 x CD 3 H1.33 L1.47, MESO-B[MSLN]_H0L0 x CD 3 H1.33 L1.47, MESO-A[MSLN]_H1.1_L1 x CD 3 H1.31 L1.47, and MESO-B[MSLN]_H0L0 x CD 3 H1.31 L1.47.

[0300] In some embodiments, the 1+1 Fab-scFv-Fc format includes skew variants, pI variants, ablation variants and FcRn variants. Accordingly, some embodiments include 1+1 Fab-scFv-Fc formats that comprise: a) a first monomer (the “scFv monomer”) that comprises a charged scFv linker (with the +H sequence of FIG. 6 being preferred in some embodiments), the skew variants S364K/E357Q, the ablation variants E233P/L234V/L235A/G236del/S267K, the FcRn variants M428L/N434S and an scFv that binds to CD3 as outlined herein; b) a second monomer (the “Fab monomer”) that comprises the skew variants L368D/K370S, the pI variants N208D/Q295E/N384D/Q418E/N421D, the ablation variants E233P/L234V/L235A/G236del/S267K, the FcRn variants M428L/N434S, and a variable heavy domain; and c) a light chain that includes a variable light domain(VL) and a constant light domain (CL), wherein numbering is according to EU numbering. The variable heavy domain and variable light domain make up a MSLN binding domain. CD3 binding domain sequences finding particular use in these embodiments include, but are not limited to, H1.30_L1.47, H1.32_L1.47, H1.89_L1.47, H1.90_L1.47, H1.33_L1.47, H1.31_L1.47, L1.47_H1.30, L1.47_H1.30, L1.47_H1.32, L1.47_H1.89, L1.47_H1.90, L1.47_H1.33, and L1.47_H1.31 as well as those depicted in FIGS. 10A-10F. MSLN binding domain sequences that are of particular use in these embodiments include, but are not limited to: MESO-A[MSLN]_H1.1_L1, MESO-B[MSLN]_H0L0, MESO-C[MSLN]_H1L1, MESO-C[MSLN]_H1.1_L1, MESO-C[MSLN]_H1.2L1, MESO-C[MSLN]_H1.3_L1, MESO-C[MSLN]_H1.4_L1, MESO-C[MSLN]_H1.5_L1, MESO-C[MSLN]_H1.6_L1, MESO-C[MSLN]_H1.7_L1, MESO-C[MSLN]_H1.8_L1, MESO-C[MSLN]_H1.9_L1, MESO-C[MSLN]_H1_L1.1, MESO-C[MSLN]_H1_L1.2, MESO-C[MSLN]_H1_L1.3, MESO-C[MSLN]_H1_L1.4, MESO-C[MSLN]_H1_L1.5, MESO-C[MSLN]_H1_L1.6, MESO-C[MSLN]_H1_L1.7, MESO-C[MSLN]_H1_L1.8, MESO-C[MSLN]_H1_L1.9, MESO-C[MSLN]_H1_L1.10, MESO-C[MSLN]_H1.5_L1.3, MESO-C[MSLN]_H1.6_L1.3, MESO-C[MSLN]_H1.12_L1.9, MESO-C[MSLN]_H1.13_L1.9, MESO-C[MSLN]_H1.3_L1.13, MESO-C[MSLN]_H1.3_L1.14, MESO-C[MSLN]_H1.3_L1.15, MESO-C[MSLN]_H1.3_L1.16, MESO-C[MSLN]_H1.3_L1.17, MESO-C[MSLN]_H1.3_L1.18, MESO-C[MSLN]_H1.3_L1.9, MESO-C[MSLN]_H1.3_L1.5, MESO-C[MSLN]_H1_L1.20, MESO-C[MSLN]_H1.12_L1.20,MESO-C[MSLN]_H1.14_L1.14, MESO-C[MSLN]_H1.15_L1.14, MESO-C[MSLN]_H1.16_L1.14, MESO-C[MSLN]_H1_L1.19, MESO-C[MSLN]_H1_L1.21, MESO-C[MSLN]_H1_L1.22, MESO-C[MSLN]_H1.12_L1.19, MESO-C[MSLN]_H1.12_L1.21, MESO-C[MSLN]_H1.12_L1.22, and MESO-C[MSLN]_H1.12_L1.9 (FIGS. 15-21).

[0301] Particularly useful MSLN and CD3 sequence combinations for use with the 1+1 Fab_{z}-scFv-Fc format antibody include, for example, are disclosed in FIGS. 23-27 and include: MESO-A[MSLN]_H1.1_L1 x CD 3 H1.30 L1.47, MESO-B[MSLN]_H0L0 x CD3 H1.30 L1.47, MESO-C[MSLN]_H1L1_x CD 3 H1.30 L1.47, MESO-C[MSLN]_H1.1_L1 x CD 3 H1.30 L1.47, MESO-C[MSLN]_H1.2_L1 x CD 3 H1.30 L1.47, MESO-C[MSLN]_H1.3_L1_x CD 3 H1.30 L1.47, MESO-C[MSLN]_H1.4_L1 x CD 3 H1.30 L1.47, MESO-C[MSLN]_H1.5_L1 x CD 3 H1.30 L1.47, MESO-C[MSLN]_H1.6_L1 x CD 3 H1.30 L1.47, MESO-C[MSLN]_H1.7_L1 x CD 3 H1.30 L1.47, MESO-C[MSLN]_H1.8_L1 x CD3 H1.30 L1.47, MESO-C[MSLN]_H1.9_L1 x CD 3 H1.30 L1.47, MESO-C[MSLN]_H1_L1.1 x CD 3 H1.30 L1.47, MESO-C[MSLN]_H1_L1.2 x CD 3 H1.30 L1.47, MESO-C[MSLN]_H1_L1.3 x CD 3 H1.30 L1.47, MESO-C[MSLN]_H1_L1.4 x CD3 H.130 L1.47, MESO-C[MSLN]_H1_L1.5 x CD 3 H1.30 L1.47, MESO-C[MSLN]_H1_L1.6_x CD 3 H1.30 L1.47, MESO-C[MSLN]_H1_L1.7 x CD 3 H1.30 L1.47, MESO-C[MSLN]_H1_L1.8 x CD3 H1.30 L1.47, MESO-C[MSLN]_H1_L1.9 x CD 3 H1.30 L1.47, MESO-C[MSLN]_H1_L1.10 x CD 3 H1.30 L1.47, MESO-C[MSLN]_H1.5_L1.3 x CD 3 H1.30 L1.47, MESO-C[MSLN]_H1.6_L1.3 x CD3 H.130 L1.47, MESO-C[MSLN]_H1.12_L1.9 x CD 3 H1.30 L1.47, MESO-C[MSLN]_H1.13_L1.9 x CD 3 H1.30 L1.47, MESO-C[MSLN]_H1.3_L1.13 x CD 3 H1.30 L1.47, MESO-C[MSLN]_H1.3_L1.14 x CD 3 H1.30 L1.47, MESO-C[MSLN]_H1.3_L1.15 x CD 3 H1.30 L1.47, MESO-C[MSLN]_H1.3_L1.16 x CD 3 H1.30 L1.47, MESO-C[MSLN]_H1.3_L1.17 x CD 3 H1.30 L1.47, MESO-C[MSLN]_H1.3_L1.18 x CD 3 H1.30 L1.47, MESO-C[MSLN]_H1.3_L1.9 x CD 3 H1.30 L1.47, MESO-C[MSLN]_H1.3_L1.5 x CD 3 H1.30 L1.47, MESO-C[MSLN]_H1_L1.20 x CD 3 H1.30 L1.47, MESO-C[MSLN]_H1.12_L1.20 x CD 3 H1.30 L1.47, MESO-A[MSLN]_H1.1_L1 x CD 3 H1.32 L1.47, MESO-B[MSLN]_H0L0 x CD 3 H1.32 L1.47, MESO-C[MSLN]_H1L1 x CD 3 H1.32 L1.47, MESO-C[MSLN]_H1.14_L1.14 x CD3 L1.47 H1.32, MESO-C[MSLN]_H1.15_L1.14 x CD3 L1.47 H1.32, MESO-C[MSLN]_H1.16_L1.14 x CD3 L1.47 H1.32, MESO-A[MSLN]_H1.1_L1 x CD 3 H1.33 L1.47, MESO-B[MSLN]_H0L0 x CD3 H1.33 L1.47, MESO-A[MSLN]_H1.1_L1 x CD 3 H1.31 L1.47, and MESO-B[MSLN]_H0L0 x CD 3 H1.31 L1.47.

[0302] FIGS. 7A-7D show some exemplary Fc domain sequences that are useful in the 1+1 Fab-scFv-Fc format antibodies. The “monomer 1” sequences depicted in FIGS. 7A-7D typically refer to the Fc domain of the “Fab-Fc heavy chain” and the “monomer 2” sequences refer to the Fc domain of the “scFv-Fc heavy chain.” Further, FIG. 9 provides useful CL sequences that can be used with this format.

[0303] In some embodiments, any of the VH and VL sequences depicted herein (including all VH and VL sequences depicted in the Figures and Sequence Listings, including those directed to MSLN) can be added to the bottle opener backbone formats of FIG. 7A-7D as the “Fab side”, using any of the anti-CD3 scFv sequences shown in the Figures and Sequence Listings.

[0304] For bottle opener backbone 1 from FIG. 7A, (optionally including the 428L/434S variants), CD binding domain sequences finding particular use in these embodiments include, but are not limited to, CD3 binding domain anti-CD3 H1.30_L1.47, anti-CD3 H1.32_L1.47, anti-CD3 H1.89_L1.47, anti-CD3 H1.90_L1.47, anti-CD3 H1.33_L1.47 and anti-CD3 H1.31_L1.47, as well as those depicted in FIG. 10A-10F, attached as the scFv side of the backbones shown in FIGS. 7A-7D.

[0305] Particularly useful MSLN and CD3 sequence combinations for use (optionally including the 428L/434S variants), are disclosed in FIGS. 23-27.

[0306] In some embodiments, the 1+1 Fab-scFv-Fc format includes sequences selected from: XENP16249, XENP16250, XENP16253, XENP16827, XENP31693.

[0307] In some embodiments, the 1+1 Fab-scFv-Fc format comprises sequences selected from: XENP16248, XENP16833, XENP31697, XENP32550, XENP32551, XENP32552, XENP32553, XENP32554, XENP32555, XENP32556, XENP32557, XENP32558, XENP32559, XENP32560, XENP32561, XENP32562, XENP32563, XENP32564, XENP32565, XENP32566, XENP32567, XENP32568, XENP32569, XENP32570, XENP32937, XENP32938, XENP32939, XENP32940, XENP32941, XENP32942, XENP32943, XENP32944, XENP32945, XENP32946, XENP33888, XENP33889, XENP30764, XENP30765, XENP31701, XENP33969, XENP33971, XENP33973, XENP16251, XENP16834, XENP16252, and XENP16835 (FIGS. 23-27).

[0308] In some embodiments, the 1+1 Fab-scFv-Fc format comprises a variable heavy chain MSLN sequence comprising one or more of the following mutations: S31G, W32Y, M50W, H52N, N53Q, D55G, I94R, T97S, E61Q, E61Y, and/or K100bR.

[0309] In some embodiments, the 1+1 Fab-scFv-Fc format comprises a variable light chain MSLN sequence comprising one or more of the following mutations: A25S, H27Q, D28S, G30L, S32Y, V33L, T37Q, H55E, T56S, S92Y, Y94T, Y94L, Y94V, Y94I, Y94H, D28S and Y100F.

[0310] In some embodiments, the 1+1 Fab-scFv-Fc format includes a MSLN binding domain that includes a MSLN binding domain variable heavy domain selected from any of FIGS. 15-18 and 20-21. In some embodiments, the 1+1 Fab-scFv-Fc format includes a MSLN binding domain that includes a MSLN binding domain variable light domain selected from any of FIGS. 15-17 and 19-21. In some embodiments, the 1+1 Fab-scFv-Fc format includes a MSLN binding domain that includes a combination of any of the MSLN binding domain variable heavy domains and variable light domains in FIGS. 15-21.

[0311] 2. mAb-Fv

[0312] One heterodimeric scaffold that finds particular use in the antibodies described herein is the mAb-Fv format. In this embodiment, the format relies on the use of a C-terminal attachment of an “extra” variable heavy domain to one monomer and the C-terminal attachment of an “extra” variable light domain to the other monomer, thus forming a third antigen binding domain, wherein the Fab portions of the two monomers bind a MSLN and the “extra” scFv domain binds CD3.

[0313] In this embodiment, the first monomer comprises a first heavy chain, comprising a first variable heavy domain and a first constant heavy domain comprising a first Fc domain, with a first variable light domain covalently attached to the C-terminus of the first Fc domain using a domain linker (VH1-CH1-hinge-CH2-CH3-[optional linker]-VL2). The second monomer comprises a second variable heavy domain of the second constant heavy domain comprising a second Fc domain, and a third variable heavy domain covalently attached to the C-terminus of the second Fc domain using a domain linker (vh1-CH1-hinge-CH2-CH3-[optional linker]-VH2. The two C-terminally attached variable domains make up a Fv that binds CD3 (as it is less preferred to have bivalent CD3 binding). This embodiment further utilizes a common light chain comprising a variable light domain and a constant light domain that associates with the heavy chains to form two identical Fabs that bind a MSLN. As for many of the embodiments herein, these constructs include skew variants, pI variants, ablation variants, additional Fc variants, etc. as desired and described herein.

[0314] The antibodies described herein provide mAb-Fv formats where the CD3 binding domain sequences are as shown in FIG. 10A-10F. The antibodies described herein provide mAb-Fv formats wherein the MSLN binding domain sequences are as shown in FIGS. 15-21.

[0315] In addition, the Fc domains of the mAb-Fv format comprise skew variants (e.g. a set of amino acid substitutions as shown in FIGS. 1 and 4, with particularly useful skew variants being selected from the group consisting of S364K/E357Q:L368D/K370S; L368D/K370S:S364K; L368E/K370S:S364K; T411T/E360E/Q362E:D401K; L368D/K370S:S364K/E357L, K370S:S364K/E357Q, T366S/L368A/Y407V:T366W and T366S/L368A/Y407V/Y349C:T366W/S354C), optionally ablation variants (including those shown in FIG. 3), optionally charged scFv linkers (including those shown in FIG. 5) and the heavy chain comprises pI variants (including those shown in FIG. 2).

[0316] In some embodiments, the mAb-Fv format includes skew variants, pI variants, and ablation variants. Accordingly, some embodiments include mAb-Fv formats that comprise: a) a first monomer that comprises the skew variants S364K/E357Q, the ablation variants E233P/L234V/L235A/G236del/S267K, and a first variable heavy domain that, with the first variable light domain of the light chain, makes up an Fv that binds to MSLN, and a second variable heavy domain; b) a second monomer that comprises the skew variants L368D/K370S, the pI variants N208D/Q295E/N384D/Q418E/N421D, the ablation variants E233P/L234V/L235A/G236del/S267K, and a first variable heavy domain that, with the first variable light domain, makes up the Fv that binds to MSLN as outlined herein, and a second variable light chain, that together with the second variable heavy domain forms an Fv (ABD) that binds to CD3; and c) a light chain comprising a first variable light domain and a constant light domain.

[0317] In some embodiments, the mAb-Fv format includes skew variants, pI variants, ablation variants and FcRn variants. Accordingly, some embodiments include mAb-Fv formats that comprise: a) a first monomer that comprises the skew variants S364K/E357Q, the ablation variants E233P/L234V/L235A/G236del/S267K, the FcRn variants M428L/N434S and a first variable heavy domain that, with the first variable light domain of the light chain, makes up an Fv that binds to MSLN, and a second variable heavy domain; b) a second monomer that comprises the skew variants L368D/K370S, the pI variants N208D/Q295E/N384D/Q418E/N421D, the ablation variants E233P/L234V/L235A/G236del/S267K, the FcRn variants M428L/N434S and a first variable heavy domain that, with the first variable light domain, makes up the Fv that binds to MSLN as outlined herein, and a second variable light chain, that together with the second variable heavy domain of the first monomer forms an Fv (ABD) that binds CD3; and c) a light chain comprising a first variable light domain and a constant light domain.

[0318] In some embodiments, the MSLN binding domains include the variable heavy and variable light domain of any one of the MSLN binding domains disclosed in FIGS. 15-21.

[0319] 3. mAb-scFv

[0320] One heterodimeric scaffold that finds particular use in the antibodies described herein is the mAb-scFv format. In this embodiment, the format relies on the use of a C-terminal attachment of a scFv to one of the monomers, thus forming a third antigen binding domain, wherein the Fab portions of the two monomers bind MSLN and the “extra” scFv domain binds CD3. Thus, the first monomer comprises a first heavy chain (comprising a variable heavy domain and a constant domain), with a C-terminally covalently attached scFv comprising a scFv variable light domain, an scFv linker and a scFv variable heavy domain in either orientation (VH1-CH1-hinge-CH2-CH3-[optional linker]-VH2-scFv linker-VL2 or VH1-CH1-hinge-CH2-CH3-[optional linker]-VL2-scFv linker-VH2). This embodiment further utilizes a common light chain comprising a variable light domain and a constant light domain that associates with the heavy chains to form two identical Fabs that bind MSLN. As for many of the embodiments herein, these constructs include skew variants, pI variants, ablation variants, additional Fc variants, etc. as desired and described herein.

[0321] The antibodies described herein provide mAb-scFv formats where the CD binding domain sequences are as shown in FIG. 10A-10F and the MSLN binding domain sequences are as shown in FIGS. 15-21.

[0322] In addition, the Fc domains of the mAb-scFv format comprise skew variants (e.g. a set of amino acid substitutions as shown in FIGS. 1 and 4, with particularly useful skew variants being selected from the group consisting of S364K/E357Q:L368D/K370S; L368D/K370S:S364K; L368E/K370S:S364K; T411T/E360E/Q362E:D401K; L368D/K370S:S364K/E357L, K370S:S364K/E357Q, T366S/L368A/Y407V:T366W and T366S/L368A/Y407V/Y349C:T366W/S354C), optionally ablation variants (including those shown in FIG. 3), optionally charged scFv linkers (including those shown in FIG. 5) and the heavy chain comprises pI variants (including those shown in FIG. 2).

[0323] In some embodiments, the mAb-scFv format includes skew variants, pI variants, and ablation variants. Accordingly, some embodiments include mAb-scFv formats that comprise: a) a first monomer that comprises the skew variants S364K/E357Q, the ablation variants E233P/L234V/L235A/G236del/S267K, and a variable heavy domain that, with the variable light domain of the common light chain, makes up an Fv that binds to MSLN as outlined herein, and a scFv domain that binds to CD3; b) a second monomer that comprises the skew variants L368D/K370S, the pI variants N208D/Q295E/N384D/Q418E/N421D, the ablation variants E233P/L234V/L235A/G236del/S267K, and a variable heavy domain that, with the variable light domain of the common light chain, makes up an Fv that binds to MSLN as outlined herein; and c) a common light chain comprising a variable light domain and a constant light domain.

[0324] In some embodiments, the mAb-scFv format includes skew variants, pI variants, ablation variants and FcRn variants. Accordingly, some embodiments include mAb-scFv formats that comprise: a) a first monomer that comprises the skew variants S364K/E357Q, the ablation variants E233P/L234V/L235A/G236del/S267K, the FcRn variants M428L/N434S and a variable heavy domain that, with the variable light domain of the common light chain, makes up an Fv that binds to MSLN as outlined herein, and a scFv domain that binds to CD3; b) a second monomer that comprises the skew variants L368D/K370S, the pI variants N208D/Q295E/N384D/Q418E/N421D, the ablation variants E233P/L234V/L235A/G236del/S267K, the FcRn variants M428L/N434S and a variable heavy domain that, with the variable light domain of the common light chain, makes up an Fv that binds to MSLN as outlined herein; and c) a common light chain comprising a variable light domain and a constant light domain.

[0325] In some embodiments, the MSLN binding domains include the variable heavy and variable light domain of any one of the MSLN binding domains disclosed in FIGS. 15-21.

[0326] 4. 2+1 Fab₂-scFv-Fc Format

[0327] One heterodimeric scaffold that finds particular use in the antibodies described herein is the “2+1 Fab₂-scFv-Fc” format (also referred to in previous related filings as “Central-scFv format”) shown in FIG. 22B with an exemplary combination of a CD3 binding domain and two tumor target antigen (MSLN) binding domains. In this embodiment, the format relies on the use of an inserted scFv domain thus forming a third antigen binding domain, wherein the Fab portions of the two monomers bind MSLN and the “extra” scFv domain binds CD3. The scFv domain is inserted between the Fc domain and the CH1-Fv region of one of the monomers, thus providing a third antigen binding domain. As described, MSLN x CD3 bispecific antibodies having the 2+1 Fab2-scFv-Fc format are potent in inducing redirected T cell cytotoxicity in cellular environments that express low levels of MSLN. Moreover, as shown in the examples, MSLN x CD3 bispecific antibodies having the 2+1 Fab2-scFv-Fc format allow for the “fine tuning” of immune responses as such antibodies exhibit a wide variety of different properties, depending on the MSLN and/or CD3 binding domains used. For example, such antibodies exhibit differences in selectivity for cells with different MSLN expression, potencies for MSLN expressing cells, ability to elicit cytokine release, and sensitivity to soluble MSLN. These MSLN antibodies find use, for example, in the treatment of MSLN associated cancers.

[0328] In this embodiment, one monomer comprises a first heavy chain comprising a first variable heavy domain, a CH1 domain (and optional hinge) and Fc domain, with a scFv comprising a scFv variable light domain, an scFv linker and a scFv variable heavy domain. The scFv is covalently attached between the C-terminus of the CH1 domain of the heavy constant domain and the N-terminus of the first Fc domain using optional domain linkers (VH1-CH1-[optional linker]-VH2-scFv linker-VL2-[optional linker including the hinge]-CH2-CH3, or the opposite orientation for the scFv, VH1-CH1-[optional linker]-VL2-scFv linker-VH2-[optional linker including the hinge]-CH2-CH3). The optional linkers can be any suitable peptide linkers, including, for example, the domain linkers included in FIG. 6. In some embodiments, the optional linker is a hinge or a fragment thereof. The other monomer is a standard Fab side (i.e., VH1-CH1-hinge-CH2-CH3). This embodiment further utilizes a common light chain comprising a variable light domain and a constant light domain, that associates with the heavy chains to form two identical Fabs that bind MSLN. As for many of the embodiments herein, these constructs include skew variants, pI variants, ablation variants, additional Fc variants, etc. as desired and described herein.

[0329] In one embodiment, the 2+1 Fab₂-scFv-Fc format antibody includes an scFv with the VH and VL of a CD3 binding domain sequence depicted in FIG. 10A-10F or the Sequence Listing. In one embodiment, the 2+1 Fab₂-scFv-Fc format antibody includes two Fabs having the VH and VL of a MSLN binding domain as shown in FIGS. 15-21 and the Sequence Listing. In an exemplary embodiment, the MSLN binding domain of the 2+1 Fab₂-scFv-Fc MSLN x CD3 bispecific antibody includes the VH and VL of one of the following MSLN binding domains: MESO-A[MSLN]_H1.1_L1, MESO-B[MSLN]_H0L0, MESO-C[MSLN]_H1L1, MESO-C[MSLN]_H1.1_L1, MESO-C[MSLN]_H1.2L1, MESO-C[MSLN]_H1.3_L1, MESO-C[MSLN]_H1.4_L1, MESO-C[MSLN]_H1.5_L1, MESO-C[MSLN]_H1.6_L1, MESO-C[MSLN]_H1.7_L1, MESO-C[MSLN]_H1.8_L1, MESO-C[MSLN]_H1.9_L1, MESO-C[MSLN]_H1_L1.1, MESO-C[MSLN]_H1_L1.2, MESO-C[MSLN]_H1_L1.3, MESO-C[MSLN]_H1_L1.4, MESO-C[MSLN]_H1_L1.5, MESO-C[MSLN]_H1_L1.6, MESO-C[MSLN]_H1_L1.7, MESO-C[MSLN]_H1_L1.8, MESO-C[MSLN]_H1_L1.9, MESO-C[MSLN]_H1_L1.10, MESO-C[MSLN]_H1.5_L1.3, MESO-C[MSLN]_H1.6_L1.3, MESO-C[MSLN]_H1.12_L1.9, MESO-C[MSLN]_H1.13_L1.9, MESO-C[MSLN]_H1.3_L1.13, MESO-C[MSLN]_H1.3_L1.14, MESO-C[MSLN]_H1.3_L1.15, MESO-C[MSLN]_H1.3_L1.16, MESO-C[MSLN]_H1.3_L1.17, MESO-C[MSLN]_H1.3_L1.18, MESO-C[MSLN]_H1.3_L1.9, MESO-C[MSLN]_H1.3_L1.5, MESO-C[MSLN]_H1_L1.20, MESO-C[MSLN]_H1.12_L1.20, MESO-C[MSLN]_H1.14_L1.14, MESO-C[MSLN]_H1.15_L1.14, MESO-C[MSLN]_H1.16_L1.14, MESO-C[MSLN]_H1_L1.19, MESO-C[MSLN]_H1_L1.21, MESO-C[MSLN]_H1_L1.22, MESO-C[MSLN]_H1.12_L1.19, MESO-C[MSLN]_H1.12_L1.21, MESO-C[MSLN]_H1.12_L1.22, and MESO-C[MSLN]_H1.12_L1.9 (FIGS. 15-21). In one embodiment, the CD3 binding domain of the 2+1 Fab2-scFv-Fc format antibody includes the VH and VL of one of the following CD3 binding domains: H1.30_L1.47, H1.32_L1.47, H1.89_L1.47, H1.90_L1.47, H1.33_L1.47, H1.31_L1.47, L1.47_H1.30, L1.47_H1.30, L1.47_H1.32, L1.47_H1.89, L1.47_H1.90, L1.47_H1.33, and L1.47_H1.31 (FIGS. 10A-10F). Particularly useful MSLN and CD3 combinations for use in the 2+1 Fab2-scFv-Fc format antibody format are disclosed in FIGS. 28-32 and include: MESO-A[MSLN]_H1.1 L1 x CD3 H1.30 L1.47, MESO-B[MSLN]_H0L0 x CD3 H1.30 L1.47, MESO-C[MSLN]_H1L1 x CD3 H1.30 L1.47, MESO-A[MSLN]_H1.1_L1 x CD3 L1.47 H1.30, MESO-B[MSLN]_H0L0 x CD3 L1.47 H1.30, MESO-C[MSLN]_H1L1 x CD3 L1.47 H1.30, MESO-A[MSLN]_H1.1_L1 x CD3 H1.32 L1.47, MESO-B[MSLN]_H0L0 x CD3 H1.32 L1.47, MESO-C[MSLN]_H1L1 x CD3 H1.32 L1.47, MESO-C[MSLN]_H1_L1.3 x CD3 H1.32 L1.47, MESO-C[MSLN]_H1 L1.4 x CD3 H1.32 L1.47, MESO-C[MSLN]_H1 L1.5 x CD3 H1.32 L1.47, MESO-C[MSLN]_H1 L1.9 x CD3 H1.32 L1.47, MESO-A[MSLN]_H1.1 L1 x CD3 L1.47 H1.32, MESO-B[MSLN]_H0L0 x CD3 L1.47 H1.32, MESO-C[MSLN]_H1L1 x CD3 L1.47 H1.32, MESO-C[MSLN]_H1 L1.3 x CD3 L1.47 H1.32, MESO-C[MSLN]_H1 L1.4 x CD3 L1.47 H1.32, MESO-C[MSLN]_H1 L1.5 x CD3 L1.47 H1.32, MESO-C[MSLN]_H1 L1.9 x CD3 L1.47 H1.32, MESO-C[MSLN]_H1.3 L1 x CD3 L1.47 H1.32, MESO-C[MSLN]_H1.12 L1.9 x CD3 L1.47 H1.32, MESO-C[MSLN]_H1.13 L1.9 x CD3 L1.47 H1.32, MESO-C[MSLN]_H1.3 L1.9 x CD3 L1.47 H1.32, MESO-C[MSLN]_H1.3 L1.5 x CD3 L1.47 H1.32, MESO-C[MSLN]_H1.3 L1.13 x CD3 L1.47 H1.32, MESO-C[MSLN]_H1.3 L1.14 x CD3 L1.47 H1.32, MESO-C[MSLN]_H1 L1.19 x CD3 L1.47 H1.32, MESO-C[MSLN]_H1 L1.20 x CD3 L1.47 H1.32, MESO-C[MSLN]_H1 L1.21 x CD3 L1.47 H1.32, MESO-C[MSLN]_H1 L1.22 x CD3 L1.47 H1.32, MESO-C[MSLN]_H1.12 L1.19 x CD3 L1.47 H1.32, MESO-C[MSLN]_H1.12 L1.20 x CD3 L1.47 H1.32, MESO-C[MSLN]_H1.12 L1.21 x CD3 L1.47 H1.32, MESO-C[MSLN]_H1.12 L1.22 x CD3 L1.47 H1.32, MESO-C[MSLN]_H1.14 L1.14 x CD3 L1.47 H1.32, MESO-C[MSLN]_H1.15 L1.14 x CD3 L1.47 H1.32, MESO-C[MSLN]_H1.12 L1.19 x CD3 L1.47 H1.32, MESO-C[MSLN]_H1.3 L1.14 x CD3 L1.47 H1.32, MESO-C[MSLN]_H1.3 L1.13 x CD3 L1.47 H1.32, MESO-C[MSLN]_H1.3 L1 x CD3 L1.47 H1.32, MESO-C[MSLN]_H1.12 L1.9 x CD3 L1.47 H1.32, MESO-A[MSLN]_H1.1 L1 x CD3 L1.47 H1.89, MESO-B[MSLN]_H0L0 x CD3 L1.47 H1.89, MESO-C[MSLN]_H1L1 x CD3 L1.47 H1.89, MESO-C[MSLN]_H1 L1.3 x CD3 L1.47 H1.89, MESO-C[MSLN]_H1 L1.4 x CD3 L1.47 H1.89, MESO-C[MSLN]_H1 L1.5 x CD3 L1.47 H1.89, MESO-C[MSLN]_H1 L1.9 x CD3 L1.47 H1.89, MESO-C[MSLN]_H1.3 L1.14 x CD3 L1.47 H1.89, MESO-C[MSLN]_H1 L1.20 x CD3 L1.47 H1.89, MESO-C[MSLN]_H1.12 L1.20 x CD3 L1.47 H1.89, MESO-C[MSLN]_H1.3 L1.13 x CD3 L1.47 H1.89, MESO-C[MSLN]_H1.3 L1 x CD3 L1.47 H1.89, MESO-C[MSLN]_H1 L1.9 x CD3 L1.47 H1.89, MESO-C[MSLN]_H1.12 L1.9 x CD3 L1.47 H1.89, MESO-C[MSLN]_H1.3 L1.14 x CD3 L1.47 H1.89, MESO-C[MSLN]_H1.3 L1.13 x CD3 L1.47 H1.89, MESO-C[MSLN]_H1.3 L1 x CD3 L1.47 H1.89, MESO-C[MSLN]_H1.12 L1.9 x CD3 L1.47 H1.89, MESO-C[MSLN]_H1.3 L1.14 x CD3 L1.47 H1.89, MESO-C[MSLN]_H1.3 L1.13 x CD3 L1.47 H1.89, MESO-C[MSLN]_H1.3 L1 x CD3 L1.47 H1.89, and MESO-C[MSLN]_H1.12 L1.9 x CD3 L1.47 H1.89.

[0330] In addition, the Fc domains of the 2+1 Fab₂-scFv-Fc format comprise skew variants (e.g. a set of amino acid substitutions as shown in FIGS. 1 and 4, with particularly useful skew variants being selected from the group consisting of S364K/E357Q:L368D/K370S; L368D/K370S:S364K; L368E/K370S:S364K; T411T/E360E/Q362E:D401K; L368D/K370S:S364K/E357L, K370S:S364K/E357Q, T366S/L368A/Y407V:T366W and T366S/L368A/Y407V/Y349C:T366W/S354C), optionally ablation variants (including those shown in FIG. 3), optionally charged scFv linkers (including those shown in FIG. 5) and the heavy chain comprises pI variants (including those shown in FIG. 2).

[0331] In some embodiments, the 2+1 Fab₂-scFv-Fc format antibody includes skew variants, pI variants, and ablation variants. Accordingly, some embodiments include 2+1 Fab₂-scFv-Fc formats that comprise: a) a first monomer (the Fab-scFv-Fc side) that comprises the skew variants S364K/E357Q, the ablation variants E233P/L234V/L235A/G236del/S267K, and a variable heavy domain that, with the variable light domain of the common light chain, makes up an Fv that binds to MSLN as outlined herein, and an scFv domain that binds to CD3; b) a second monomer (the Fab-Fc side) that comprises the skew variants L368D/K370S, the pI variants N208D/Q295E/N384D/Q418E/N421D, the ablation variants E233P/L234V/L235A/G236del/S267K, and a variable heavy domain that, with variable light domain of the common light chain, makes up an Fv that binds to MSLN as outlined herein; and c) a common light chain comprising the variable light domain and a constant light domain, where numbering is according to EU numbering. In some embodiments, the common light chain and variable heavy domains on each monomer for MSLN binding domains. CD3 binding domain sequences finding particular use in these embodiments include, but are not limited to, H1.30_L1.47, H1.32_L1.47, H1.89_L1.47, H1.90_L1.47, H1.33_L1.47, H1.31_L1.47, L1.47 H1.30, L1.47 H1.30, L1.47_H1.32, L1.47_H1.89, L1.47_H1.90, L1.47_H1.33, and L1.47_H1.31 as well as those depicted in FIGS. 10A-10F. MSLN binding domain sequences that are of particular use in these embodiments include, but are not limited to MESO-A[MSLN]_H1.1_L1, MESO-B[MSLN]_H0L0, MESO-C[MSLN]_H1L1, MESO-C[MSLN]_H1.1_L1, MESO-C[MSLN]_H1.2L1, MESO-C[MSLN]_H1.3_L1, MESO-C[MSLN]_H1.4_L1, MESO-C[MSLN]_H1.5_L1, MESO-C[MSLN]_H1.6_L1, MESO-C[MSLN]_H1.7_L1, MESO-C[MSLN]_H1.8_L1, MESO-C[MSLN]_H1.9_L1, MESO-C[MSLN]_H1_L1.1, MESO-C[MSLN]_H1_L1.2, MESO-C[MSLN]_H1_L1.3, MESO-C[MSLN]_H1_L1.4, MESO-C[MSLN]_H1_L1.5, MESO-C[MSLN]_H1_L1.6, MESO-C[MSLN]_H1_L1.7, MESO-C[MSLN]_H1_L1.8, MESO-C[MSLN]_H1_L1.9, MESO-C[MSLN]_H1_L1.10, MESO-C[MSLN]_H1.5_L1.3, MESO-C[MSLN]_H1.6_L1.3, MESO-C[MSLN]_H1.12_L1.9, MESO-C[MSLN]_H1.13_L1.9, MESO-C[MSLN]_H1.3_L1.13, MESO-C[MSLN]_H1.3_L1.14, MESO-C[MSLN]_H1.3_L1.15, MESO-C[MSLN]_H1.3_L1.16, MESO-C[MSLN]_H1.3_L1.17, MESO-C[MSLN]_H1.3_L1.18, MESO-C[MSLN]_H1.3_L1.9, MESO-C[MSLN]_H1.3_L1.5, MESO-C[MSLN]_H1_L1.20, MESO-C[MSLN]_H1.12_L1.20,_MESO-C[MSLN]_H1.14_L1.14, MESO-C[MSLN]_H1.15_L1.14, MESO-C[MSLN]_H1.16_L1.14, MESO-C[MSLN]_H1_L1.19, MESO-C[MSLN]_H1_L1.21, MESO-C[MSLN]_H1_L1.22, MESO-C[MSLN]_H1.12_L1.19, MESO-C[MSLN]_H1.12_L1.21, MESO-C[MSLN]_H1.12_L1.22, and MESO-C[MSLN]_H1.12_L1.9 (FIGS. 15-21).

[0332] In some embodiments, the 2+1 Fab₂-scFv-Fc format antibody includes skew variants, pI variants, ablation variants and FcRn variants. Accordingly, some embodiments include 2+1 Fab₂-scFv-Fc formats that comprise: a) a first monomer (the Fab-scFv-Fc side) that comprises the skew variants S364K/E357Q, the ablation variants E233P/L234V/L235A/G236del/S267K, the FcRn variants M428L/N434S and a variable heavy domain that, with the variable light domain of the common light chain, makes up an Fv that binds to MSLN as outlined herein, and an scFv domain that binds to CD3; b) a second monomer (the Fab-Fc side) that comprises the skew variants L368D/K370S, the pI variants N208D/Q295E/N384D/Q418E/N421D, the ablation variants E233P/L234V/L235A/G236del/S267K, the FcRn variants M428L/N434S and a variable heavy domain that, with variable light domain of the common light chain, makes up an Fv that binds to MSLN as outlined herein; and c) a common light chain comprising a variable light domain and a constant light domain, where numbering is according to EU numbering. In some embodiments, the common light chain and variable heavy domains on each monomer for MSLN binding domains. CD3 binding domain sequences finding particular use in these embodiments include, but are not limited to, H1.30_L1.47, H1.32_L1.47, H1.89_L1.47, H1.90_L1.47, H1.33_L1.47, H1.31_L1.47, L1.47 H1.30, L1.47_H1.30, L1.47_H1.32, L1.47_H1.89, L1.47_H1.90, L1.47_H1.33, and L1.47_H1.31 as well as those depicted in FIGS. 10A-10F. In some embodiments, the MSLN binding domains include the variable heavy and variable light domain of any one of the MSLN binding domains disclosed in FIGS. 15-21. MSLN binding domain sequences that are of particular use in these embodiments include but are not limited to: MESO-A[MSLN]_H1.1_L1, MESO-B[MSLN]_H0L0, MESO-C[MSLN]_H1L1, MESO-C[MSLN]_H1.1_L1, MESO-C[MSLN]_H1.2L1, MESO-C[MSLN]_H1.3_L1, MESO-C[MSLN]_H1.4_L1, MESO-C[MSLN]_H1.5_L1, MESO-C[MSLN]_H1.6_L1, MESO-C[MSLN]_H1.7_L1, MESO-C[MSLN]_H1.8_L1, MESO-C[MSLN]_H1.9_L1, MESO-C[MSLN]_H1_L1.1, MESO-C[MSLN]_H1_L1.2, MESO-C[MSLN]_H1_L1.3, MESO-C[MSLN]_H1_L1.4, MESO-C[MSLN]_H1_L1.5, MESO-C[MSLN]_H1_L1.6, MESO-C[MSLN]_H1_L1.7, MESO-C[MSLN]_H1_L1.8, MESO-C[MSLN]_H1_L1.9, MESO-C[MSLN]_H1_L1.10, MESO-C[MSLN]_H1.5_L1.3, MESO-C[MSLN]_H1.6_L1.3, MESO-C[MSLN]_H1.12_L1.9, MESO-C[MSLN]_H1.13_L1.9, MESO-C[MSLN]_H1.3_L1.13, MESO-C[MSLN]_H1.3_L1.14, MESO-C[MSLN]_H1.3_L1.15, MESO-C[MSLN]_H1.3_L1.16, MESO-C[MSLN]_H1.3_L1.17, MESO-C[MSLN]_H1.3_L1.18, MESO-C[MSLN]_H1.3_L1.9, MESO-C[MSLN]_H1.3_L1.5, MESO-C[MSLN]_H1_L1.20, MESO-C[MSLN]_H1.12_L1.20, MESO-C[MSLN]_H1.14_L1.14, MESO-C[MSLN]_H1.15_L1.14, MESO-C[MSLN]_H1.16_L1.14, MESO-C[MSLN]_H1_L1.19, MESO-C[MSLN]_H1_L1.21, MESO-C[MSLN]_H1_L1.22, MESO-C[MSLN]_H1.12_L1.19, MESO-C[MSLN]_H1.12_L1.21, MESO-C[MSLN]_H1.12_L1.22, and MESO-C[MSLN]_H1.12_L1.9 (FIGS. 15-21).

[0333] FIGS. 8A-8C shows some exemplary Fc domain sequences that are useful with the 2+1 Fab₂-scFv-Fc format. The “monomer 1” sequences depicted in FIGS. 8A-8C typically refer to the Fc domain of the “Fab-Fc heavy chain” and the “monomer 2” sequences refer to the Fc domain of the “Fab-scFv-Fc heavy chain.” Further, FIG. 9 provides useful CL sequences that can be used with this format.

[0334] In some embodiments, the 2+1 Fab₂-scFv-Fc format includes sequences selected from: XENP16249, XENP16250, XENP16253, XENP16827, XENP31693.

[0335] In some embodiments, the 2+1 Fab₂-scFv-Fc format comprises sequences selected from: XENP31063, XENP31067, XENP31705, XENP31451, XENP31452, XENP31713, XENP31064, XENP31068, XENP31709, ENP32744, XENP32747, XENP32750, XENP32851, XENP31453, XENP31454, XENP31717, XENP32745, XENP32748, XENP32751, XENP32852, XENP32947, XENP32948, XENP32949, XENP32950, XENP32951, XENP33366, XENP33367, XENP33460, XENP33461, XENP33462, XENP33463, XENP33464, XENP33465, XENP33466, XENP33467, XENP33968, XENP33970, XENP33972, XENP34155, XENP34156, XENP34157, XENP34158, XENP31455, XENP31456, XENP32249, XENP32250, XENP32251, XENP32746, XENP32749, XENP32752, XENP32853, XENP33974, XENP33975, XENP33976, XENP33977, XENP33978, XENP33979, XENP33980, XENP34151, XENP34152, XENP34153, XENP34154, XENP34159, XENP34160, XENP34161, and XENP34162 (FIGS. 28-32).

[0336] In some embodiments, the 2+1 Fab₂-scFv-Fc format comprises a variable heavy chain MSLN sequence comprising one or more of the following mutations: S31G, W32Y, M50W, H52N, N53Q, D55G, I94R, T97S, E61Q, E61Y, and/or K100bR.

[0337] In some embodiments, the 2+1 Fab₂-scFv-Fc format comprises a variable light chain MSLN sequence comprising one or more of the following mutations: A25S, H27Q, D28S, G30L, S32Y, V33L, T37Q, H55E, T56S, S92Y, Y94T, Y94L, Y94V, Y94I, Y94H, D28S and Y100F.

[0338] In some embodiments, the 2+1 Fab₂-scFv-Fc format format includes a MSLN binding domain that includes a MSLN binding domain variable heavy domain selected from any of FIGS. 15-18 and 20-21. In some embodiments, the 2+1 Fab₂-scFv-Fc format includes a MSLN binding domain that includes a MSLN binding domain variable light domain selected from any of FIGS. 15-17 and 19-21. In some embodiments, the 2+1 Fab₂-scFv-Fc format includes a MSLN binding domain that includes a combination of any of the MSLN binding domain variable heavy domains and variable light domains in FIGS. 15-21.

[0339] 5. Central-Fv

[0340] One heterodimeric scaffold that finds particular use in the antibodies described herein is the Central-Fv format. In this embodiment, the format relies on the use of an inserted Fv domain (i.e., the central Fv domain) thus forming an “extra” third antigen binding domain, wherein the Fab portions of the two monomers bind a MSLN and the “extra” central Fv domain binds CD3. The “extra” central Fv domain is inserted between the Fc domain and the CH1-Fv region of the monomers, thus providing a third antigen binding domain (i.e., the “extra” central Fv domain), wherein each monomer contains a component of the “extra” central Fv domain (i.e., one monomer comprises the variable heavy domain and the other a variable light domain of the “extra” central Fv domain).

[0341] In this embodiment, one monomer comprises a first heavy chain comprising a first variable heavy domain, a CH1 domain, and Fc domain and an additional variable light domain. The light domain is covalently attached between the C-terminus of the CH1 domain of the heavy constant domain and the N-terminus of the first Fc domain using domain linkers (VH1-CH1-[optional linker]-VL2-hinge-CH2-CH3). The other monomer comprises a first heavy chain comprising a first variable heavy domain, a CH1 domain and Fc domain and an additional variable heavy domain (VH1-CH1-[optional linker]-VH2-hinge-CH2-CH3). The light domain is covalently attached between the C-terminus of the CH1 domain of the heavy constant domain and the N-terminus of the first Fc domain using domain linkers.

[0342] This embodiment further utilizes a common light chain comprising a variable light domain and a constant light domain, that associates with the heavy chains to form two identical Fabs that each bind a MSLN. As for many of the embodiments herein, these constructs include skew variants, pI variants, ablation variants, additional Fc variants, etc. as desired and described herein.

[0343] The antibodies described herein provide central-Fv formats where the CD3 binding domain sequences are as shown in 10A-10F and the MSLN binding domain sequences are as shown in FIGS. 15-21.

[0344] In some embodiments, the MSLN binding domains include the variable heavy and variable light domain of any one of the MSLN binding domains disclosed in FIGS. 15-21.

[0345] 6. One Armed Central-scFv

[0346] One heterodimeric scaffold that finds particular use in the antibodies described herein is the one armed central-scFv format. In this embodiment, one monomer comprises just an Fc domain, while the other monomer includes a Fab domain (a first antigen binding domain), a scFv domain (a second antigen binding domain) and an Fc domain, where the scFv domain is inserted between the Fc domain and the Fc domain. In this format, the Fab portion binds one receptor target and the scFv binds another. In this format, either the Fab portion binds a MSLN and the scFv binds CD3 or vice versa.

[0347] In this embodiment, one monomer comprises a first heavy chain comprising a first variable heavy domain, a CH1 domain and Fc domain, with a scFv comprising a scFv variable light domain, an scFv linker and a scFv variable heavy domain. The scFv is covalently attached between the C-terminus of the CH1 domain of the heavy constant domain and the N-terminus of the first Fc domain using domain linkers, in either orientation, VH1-CH1-[optional domain linker]-VH2-scFv linker-VL2-[optional domain linker]-CH2-CH3 or VH1-CH1-[optional domain linker]-VL2-scFvlinker-VH2-[optional domain linker]-CH2-CH3. The second monomer comprises an Fc domain (CH2-CH3). This embodiment further utilizes a light chain comprising a variable light domain and a constant light domain that associates with the heavy chain to form a Fab.

[0348] As for many of the embodiments herein, these constructs include skew variants, pI variants, ablation variants, additional Fc variants, etc. as desired and described herein.

[0349] The antibodies described herein provide central-Fv formats where the CD3 binding domain sequences are as shown in FIG. 10A-10F and the MSLN binding domain sequences are as shown in FIGS. 15-21.

[0350] In addition, the Fc domains of the one armed central-scFv format generally include skew variants (e.g. a set of amino acid substitutions as shown in FIGS. 1 and 4, with particularly useful skew variants being selected from the group consisting of S364K/E357Q:L368D/K370S; L368D/K370S:S364K; L368E/K370S:S364K; T411T/E360E/Q362E:D401K; L368D/K370S:S364K/E357L, K370S:S364K/E357Q, T366S/L368A/Y407V:T366W and T366S/L368A/Y407V/Y349C:T366W/S354C), optionally ablation variants (including those shown in FIG. 3), optionally charged scFv linkers (including those shown in FIG. 5) and the heavy chain comprises pI variants (including those shown in FIG. 2).

[0351] In some embodiments, the one armed central-scFv format includes skew variants, pI variants, and ablation variants. Accordingly, some embodiments of the one armed central-scFv formats comprise: a) a first monomer that comprises the skew variants S364K/E357Q, the ablation variants E233P/L234V/L235A/G236del/S267K, and a variable heavy domain that, with the variable light domain of the light chain, makes up an Fv that binds to MSLN as outlined herein, and a scFv domain that binds to CD3; b) a second monomer that includes an Fc domain having the skew variants L368D/K370S, the pI variants N208D/Q295E/N384D/Q418E/N421D, the ablation variants E233P/L234V/L235A/G236del/S267K; and c) a light chain comprising a variable light domain and a constant light domain.

[0352] In some embodiments, the one armed central-scFv format includes skew variants, pI variants, ablation variants and FcRn variants. Accordingly, some embodiments of the one armed central-scFv formats comprise: a) a first monomer that comprises the skew variants S364K/E357Q, the ablation variants E233P/L234V/L235A/G236del/S267K, the FcRn variants M428L/N434S and a variable heavy domain that, with the variable light domain of the light chain, makes up an Fv that binds to MSLN as outlined herein, and a scFv domain that binds to CD3; b) a second monomer that includes an Fc domain having the skew variants L368D/K370S, the pI variants N208D/Q295E/N384D/Q418E/N421D, the ablation variants E233P/L234V/L235A/G236del/S267K, and the FcRn variants M428L/N434S; and c) a light chain comprising a variable light domain and a constant light domain.

[0353] In some embodiments, the MSLN binding domains include the variable heavy and variable light domain of any one of the MSLN binding domains disclosed in FIGS. 15-21.

[0354] 7. One Armed scFv-mAb

[0355] One heterodimeric scaffold that finds particular use in the antibodies described herein is the one armed scFv-mAb format. In this embodiment, one monomer comprises just an Fc domain, while the other monomer uses a scFv domain attached at the N-terminus of the heavy chain, generally through the use of a linker: VH-scFv linker-VL-[optional domain linker]-CH1-hinge-CH2-CH3 or (in the opposite orientation) VL-scFv linker-VH-[optional domain linker]-CH1-hinge-CH2-CH3. In this format, the Fab portions each bind MSLN and the scFv binds CD3. This embodiment further utilizes a light chain comprising a variable light domain and a constant light domain, that associates with the heavy chain to form a Fab. As for many of the embodiments herein, these constructs include skew variants, pI variants, ablation variants, additional Fc variants, etc. as desired and described herein.

[0356] The antibodies described herein provide one armed scFv-mAb formats where the CD3 binding domain sequences are as shown in 10A-10F and wherein the MSLN binding domain sequences are as shown in FIGS. 15-21.

[0357] In addition, the Fc domains of the one armed scFv-mAb format generally include skew variants (e.g. a set of amino acid substitutions as shown in FIGS. 1 and 4, with particularly useful skew variants being selected from the group consisting of S364K/E357Q:L368D/K370S; L368D/K370S:S364K; L368E/K370S:S364K; T411T/E360E/Q362E:D401K; L368D/K370S:S364K/E357L, K370S:S364K/E357Q, T366S/L368A/Y407V:T366W and T366S/L368A/Y407V/Y349C:T366W/S354C), optionally ablation variants (including those shown in FIG. 3), optionally charged scFv linkers (including those shown in FIG. 5) and the heavy chain comprises pI variants (including those shown in FIG. 2).

[0358] In some embodiments, the one armed scFv-mAb format includes skew variants, pI variants, and ablation variants. Accordingly, some embodiments of the one armed scFv-mAb formats comprise: a) a first monomer that comprises the skew variants S364K/E357Q, the ablation variants E233P/L234V/L235A/G236del/S267K, and a variable heavy domain that, with the variable light domain of the light chain, makes up an Fv that binds to MSLN as outlined herein, and a scFv domain that binds to CD3; b) a second monomer that includes an Fc domain having the skew variants L368D/K370S, the pI variants N208D/Q295E/N384D/Q418E/N421D, the ablation variants E233P/L234V/L235A/G236del/S267K; and c) a light chain comprising a variable light domain and a constant light domain.

[0359] In some embodiments, the one armed scFv-mAb format includes skew variants, pI variants, ablation variants and FcRn variants. Accordingly, some embodiments one armed scFv-mAb formats comprise: a) a first monomer that comprises the skew variants S364K/E357Q, the ablation variants E233P/L234V/L235A/G236del/S267K, the FcRn variants M428L/N434S and a variable heavy domain that, with the variable light domain of the light chain, makes up an Fv that binds to MSLN as outlined herein, and a scFv domain that binds to CD3; b) a second monomer that includes an Fc domain having the skew variants L368D/K370S, the pI variants N208D/Q295E/N384D/Q418E/N421D, the ablation variants E233P/L234V/L235A/G236del/S267K, and the FcRn variants M428L/N434S; and c) a light chain comprising a variable light domain and a constant light domain.

[0360] In some embodiments, the MSLN binding domains include the variable heavy and variable light domain of any one of the MSLN binding domains disclosed in FIGS. 15-21.

[0361] 8. scFv-mAb

[0362] One heterodimeric scaffold that finds particular use in the antibodies described herein is the mAb-scFv format. In this embodiment, the format relies on the use of a N-terminal attachment of a scFv to one of the monomers, thus forming a third antigen binding domain, wherein the Fab portions of the two monomers bind MSLN and the “extra” scFv domain binds CD3.

[0363] In this embodiment, the first monomer comprises a first heavy chain (comprising a variable heavy domain and a constant domain), with a N-terminally covalently attached scFv comprising a scFv variable light domain, an scFv linker and a scFv variable heavy domain in either orientation ((VH1-scFv linker-VL1-[optional domain linker]-VH2-CH1-hinge-CH2-CH3) or (with the scFv in the opposite orientation) ((VL1-scFv linker-VH1-[optional domain linker]-VH2-CH1-hinge-CH2-CH3)). This embodiment further utilizes a common light chain comprising a variable light domain and a constant light domain that associates with the heavy chains to form two identical Fabs that bind MSLN. As for many of the embodiments herein, these constructs include skew variants, pI variants, ablation variants, additional Fc variants, etc. as desired and described herein.

[0364] The antibodies described herein provide scFv-mAb formats where the CD3 binding domain sequences are as shown in 10A-10F and wherein the MSLN binding domain sequences are as shown in FIGS. 15-21.

[0365] In addition, the Fc domains of the scFv-mAb format generally include skew variants (e.g. a set of amino acid substitutions as shown in FIGS. 1 and 4, with particularly useful skew variants being selected from the group consisting of S364K/E357Q:L368D/K370S; L368D/K370S:S364K; L368E/K370S:S364K; T411T/E360E/Q362E:D401K; L368D/K370S:S364K/E357L, K370S:S364K/E357Q, T366S/L368A/Y407V:T366W and T366S/L368A/Y407V/Y349C:T366W/S354C), optionally ablation variants (including those shown in FIG. 3), optionally charged scFv linkers (including those shown in FIG. 5) and the heavy chain comprises pI variants (including those shown in FIG. 2).

[0366] In some embodiments, the scFv-mAb format includes skew variants, pI variants, and ablation variants. Accordingly, some embodiments include scFv-mAb formats that comprise: a) a first monomer that comprises the skew variants S364K/E357Q, the ablation variants E233P/L234V/L235A/G236del/S267K, and a variable heavy domain that, with the variable light domain of the common light chain, makes up an Fv that binds to MSLN as outlined herein, and a scFv domain that binds to CD3; b) a second monomer that comprises the skew variants L368D/K370S, the pI variants N208D/Q295E/N384D/Q418E/N421D, the ablation variants E233P/L234V/L235A/G236del/S267K, and a variable heavy domain that, with the variable light domain of the common light chain, makes up an Fv that binds to MSLN as outlined herein; and c) a common light chain comprising a variable light domain and a constant light domain.

[0367] In some embodiments, the scFv-mAb format includes skew variants, pI variants, ablation variants and FcRn variants. Accordingly, some embodiments include scFv-mAb formats that comprise: a) a first monomer that comprises the skew variants S364K/E357Q, the ablation variants E233P/L234V/L235A/G236del/S267K, the FcRn variants M428L/N434S and a variable heavy domain that, with the variable light domain of the common light chain, makes up an Fv that binds to MSLN as outlined herein, and a scFv domain that binds to CD3; b) a second monomer that comprises the skew variants L368D/K370S, the pI variants N208D/Q295E/N384D/Q418E/N421D, the ablation variants E233P/L234V/L235A/G236del/S267K, the FcRn variants M428L/N434S and a variable heavy domain that, with the variable light domain of the common light chain, makes up an Fv that binds to MSLN as outlined herein; and c) a common light chain comprising a variable light domain and a constant light domain.

[0368] In some embodiments, the MSLN binding domains include the variable heavy and variable light domain of any one of the MSLN binding domains disclosed in FIGS. 15-21.

[0369] 9. Dual scFv Formats

[0370] The antibodies described herein also provide dual scFv formats as are known in the art. In this embodiment, the MSLN x CD3 heterodimeric bispecific antibody is made up of two scFv-Fc monomers (both in either (VH-scFv linker-VL-[optional domain linker]-CH2-CH3) format or (VL-scFv linker-VH-[optional domain linker]-CH2-CH3) format, or with one monomer in one orientation and the other in the other orientation.

[0371] The antibodies described herein provide dual scFv formats where the CD3 binding domain sequences are as shown in FIG. 10A-10F and wherein the MSLN binding domain sequences are as shown in FIGS. 15-21. In some embodiments, the dual scFv format includes skew variants, pI variants, and ablation variants. Accordingly, some embodiments include dual scFv formats that comprise: a) a first monomer that comprises the skew variants S364K/E357Q, the ablation variants E233P/L234V/L235A/G236del/S267K, and a first scFv that binds either CD3 or MSLN; and b) a second monomer that comprises the skew variants L368D/K370S, the pI variants N208D/Q295E/N384D/Q418E/N421D, the ablation variants E233P/L234V/L235A/G236del/S267K, and a second scFv that binds either CD3 or MSLN. In some embodiments, the dual scFv format includes skew variants, pI variants, ablation variants and FcRn variants. In some embodiments, the dual scFv format includes skew variants, pI variants, and ablation variants. Accordingly, some embodiments include dual scFv formats that comprise: a) a first monomer that comprises the skew variants S364K/E357Q, the ablation variants E233P/L234V/L235A/G236del/S267K, the FcRn variants M428L/N434S and a first scFv that binds either CD3 or MSLN; and b) a second monomer that comprises the skew variants L368D/K370S, the pI variants N208D/Q295E/N384D/Q418E/N421D, the ablation variants E233P/L234V/L235A/G236del/S267K, the FcRn variants M428L/N434S and a second scFv that binds either CD3 or MSLN.

[0372] In some embodiments, the MSLN binding domains include the variable heavy and variable light domain of any one of the MSLN binding domains disclosed in FIGS. 15-21.

[0373] 10. Non-Heterodimeric Bispecific Antibodies

[0374] As will be appreciated by those in the art, the MSLN and CD3 Fv sequences outlined herein can also be used in both monospecific antibodies (e.g., “traditional monoclonal antibodies”) or non-heterodimeric bispecific formats.

[0375] CD3 binding domain sequences finding particular use include, but are not limited to H1.30_L1.47, H1.32_L1.47, H1.89_L1.47, H1.90_L1.47, H1.33_L1.47, H1.31_L1.47, L1.47_H1.30, L1.47_H1.30, L1.47_H1.32, L1.47_H1.89, L1.47_H1.90, L1.47_H1.33, and L1.47_H1.31 (FIGS. 10A-10F).

[0376] MSLN binding domain sequences that are of particular use include, but are not limited to: MESO-A[MSLN]_H1.1_L1, MESO-B[MSLN]_H0L0, MESO-C[MSLN]_H1L1, MESO-C[MSLN]_H1.1_L1, MESO-C[MSLN]_H1.2L1, MESO-C[MSLN]_H1.3_L1, MESO-C[MSLN]_H1.4_L1, MESO-C[MSLN]_H1.5_L1, MESO-C[MSLN]_H1.6_L1, MESO-C[MSLN]_H1.7_L1, MESO-C[MSLN]_H1.8_L1, MESO-C[MSLN]_H1.9_L1, MESO-C[MSLN]_H1_L1.1, MESO-C[MSLN]_H1_L1.2, MESO-C[MSLN]_H1_L1.3, MESO-C[MSLN]_H1_L1.4, MESO-C[MSLN]_H1_L1.5, MESO-C[MSLN]_H1_L1.6, MESO-C[MSLN]_H1_L1.7, MESO-C[MSLN]_H1_L1.8, MESO-C[MSLN]_H1_L1.9, MESO-C[MSLN]_H1_L1.10, MESO-C[MSLN]_H1.5_L1.3, MESO-C[MSLN]_H1.6_L1.3, MESO-C[MSLN]_H1.12_L1.9, MESO-C[MSLN]_H1.13_L1.9, MESO-C[MSLN]_H1.3_L1.13, MESO-C[MSLN]_H1.3_L1.14, MESO-C[MSLN]_H1.3_L1.15, MESO-C[MSLN]_H1.3_L1.16, MESO-C[MSLN]_H1.3_L1.17, MESO-C[MSLN]_H1.3_L1.18, MESO-C[MSLN]_H1.3_L1.9, MESO-C[MSLN]_H1.3_L1.5, MESO-C[MSLN]_H1_L1.20, MESO-C[MSLN]_H1.12_L1.20,MESO-C[MSLN]_H1.14_L1.14, MESO-C[MSLN]_H1.15_L1.14, MESO-C[MSLN]_H1.16_L1.14, MESO-C[MSLN]_H1_L1.19, MESO-C[MSLN]_H1_L1.21, MESO-C[MSLN]_H1_L1.22, MESO-C[MSLN]_H1.12_L1.19, MESO-C[MSLN]_H1.12_L1.21, MESO-C[MSLN]_H1.12_L1.22, and MESO-C[MSLN]_H1.12_L1.9 (FIGS. 15-21).

[0377] In some embodiments, the MSLN binding domains include the variable heavy and variable light domain of any one of the MSLN binding domains disclosed in FIGS. 15-21.

[0378] Suitable non-heterodimeric bispecific formats are known in the art, and include a number of different formats as generally depicted in Spiess et al., Molecular Immunology (67):95-106 (2015) and Kontermann, mAbs 4:2, 182-197 (2012), both of which are expressly incorporated by reference and in particular for the figures, legends and citations to the formats therein.

[0379] 11. Trident Format

[0380] In some embodiments, the bispecific antibodies described herein are in the “Trident” format as generally described in WO2015/184203, hereby expressly incorporated by reference in its entirety and in particular for the Figures, Legends, definitions and sequences of “Heterodimer-Promoting Domains” or “HPDs”, including “K-coil” and “E-coil” sequences. Tridents rely on using two different HPDs that associate to form a heterodimeric structure as a component of the structure, see FIG. 1K. In this embodiment, the Trident format include a “traditional” heavy and light chain (e.g., VH1-CH1-hinge-CH2-CH3 and VL1-CL), a third chain comprising a first “diabody-type binding domain” or “DART®”, VH2-(linker)-VL3-HPD1 and a fourth chain comprising a second DART®, VH3-(linker)-(linker)-VL2-HPD2. The VH1 and VL1 form a first ABD, the VH2 and VL2 form a second ABD, and the VH3 and VL3 form a third ABD. In some cases, as is shown in FIG. 1K, the second and third ABDs bind the same antigen, in this instance generally MSLN, e.g., bivalently, with the first ABD binding a CD3 monovalently.

[0381] In some embodiments, the MSLN binding domains include the variable heavy and variable light domain of any one of the MSLN binding domains disclosed in FIGS. 15-21.

[0382] 12. Monospecific, Monoclonal Antibodies

[0383] As will be appreciated by those in the art, the novel Fv sequences outlined herein can also be used in both monospecific antibodies (e.g., “traditional monoclonal antibodies”) or non-heterodimeric bispecific formats. Accordingly, in some embodiments, the antibodies described herein provide monoclonal (monospecific) antibodies comprising the 6 CDRs and/or the vh and vl sequences from the figures, generally with IgG1, IgG2, IgG3 or IgG4 constant regions, with IgG1, IgG2 and IgG4 (including IgG4 constant regions comprising a S228P amino acid substitution) finding particular use in some embodiments. That is, any sequence herein with a “H_L” designation can be linked to the constant region of a human IgG1 antibody.

[0384] In some embodiments, the monospecific antibody is a MSLN monospecific antibody. In certain embodiments, the monospecific anti-MSLN antibody includes the 6 CDRs of any of the anti-MSLN antibodies selected from: MESO-A[MSLN]_H1.1_L1, MESO-B[MSLN]_H0L0, MESO-C[MSLN]_H1L1, MESO-C[MSLN]_H1.1_L1, MESO-C[MSLN]_H1.2L1, MESO-C[MSLN]_H1.3_L1, MESO-C[MSLN]_H1.4_L1, MESO-C[MSLN]_H1.5_L1, MESO-C[MSLN]_H1.6_L1, MESO-C[MSLN]_H1.7_L1, MESO-C[MSLN]_H1.8_L1, MESO-C[MSLN]_H1.9_L1, MESO-C[MSLN]_H1_L1.1, MESO-C[MSLN]_H1_L1.2, MESO-C[MSLN]_H1_L1.3, MESO-C[MSLN]_H1_L1.4, MESO-C[MSLN]_H1_L1.5, MESO-C[MSLN]_H1_L1.6, MESO-C[MSLN]_H1_L1.7, MESO-C[MSLN]_H1_L1.8, MESO-C[MSLN]_H1_L1.9, MESO-C[MSLN]_H1_L1.10, MESO-C[MSLN]_H1.5_L1.3, MESO-C[MSLN]_H1.6_L1.3, MESO-C[MSLN]_H1.12_L1.9, MESO-C[MSLN]_H1.13_L1.9, MESO-C[MSLN]_H1.3_L1.13, MESO-C[MSLN]_H1.3_L1.14, MESO-C[MSLN]_H1.3_L1.15, MESO-C[MSLN]_H1.3_L1.16, MESO-C[MSLN]_H1.3_L1.17, MESO-C[MSLN]_H1.3_L1.18, MESO-C[MSLN]_H1.3_L1.9, MESO-C[MSLN]_H1.3_L1.5, MESO-C[MSLN]_H1_L1.20, MESO-C[MSLN]_H1.12_L1.20, MESO-C[MSLN]_H1.14_L1.14, MESO-C[MSLN]_H1.15_L1.14, MESO-C[MSLN]_H1.16_L1.14, MESO-C[MSLN]_H1_L1.19, MESO-C[MSLN]_H1_L1.21, MESO-C[MSLN]_H1_L1.22, MESO-C[MSLN]_H1.12_L1.19, MESO-C[MSLN]_H1.12_L1.21, MESO-C[MSLN]_H1.12_L1.22, and MESO-C[MSLN]_H1.12_L1.9 (FIGS. 15-21).

[0385] In some embodiments, the MSLN binding domains include the variable heavy and variable light domain of any one of the MSLN binding domains disclosed in FIGS. 15-21.

### G. Antigen Binding Domains

[0386] As discussed herein, the subject heterodimeric antibodies include two antigen binding domains (ABDs), each of which bind to MSLN or CD3. As outlined herein, these heterodimeric antibodies can be bispecific and bivalent (each antigen is bound by a single ABD, for example, in the format depicted in FIG. 15A), or bispecific and trivalent (one antigen is bound by a single ABD and the other is bound by two ABDs, for example as depicted in FIG. 15B).

[0387] In addition, in general, one of the ABDs comprises a scFv as outlined herein, in an orientation from N- to C-terminus of VH-scFv linker-VL or VL-scFv linker-VH. One or both of the other ABDs, according to the format, generally is a Fab, comprising a VH domain on one protein chain (generally as a component of a heavy chain) and a VL on another protein chain (generally as a component of a light chain).

[0388] The disclosure provides a number of ABDs that bind to a number of different checkpoint proteins, as outlined below. As will be appreciated by those in the art, any set of 6 CDRs or VH and VL domains can be in the scFv format or in the Fab format, which is then added to the heavy and light constant domains, where the heavy constant domains comprise variants (including within the CH1 domain as well as the Fc domain). The scFv sequences contained in the sequence listing utilize a particular charged linker, but as outlined herein, uncharged or other charged linkers can be used, including those depicted in FIG. 7.

[0389] In addition, as discussed above, the numbering used in the Sequence Listing for the identification of the CDRs is Kabat, however, different numbering can be used, which will change the amino acid sequences of the CDRs as shown in Table 2.

[0390] For all of the variable heavy and light domains listed herein, further variants can be made. As outlined herein, in some embodiments the set of 6 CDRs can have from 0, 1, 2, 3, 4 or 5 amino acid modifications (with amino acid substitutions finding particular use), as well as changes in the framework regions of the variable heavy and light domains, as long as the frameworks (excluding the CDRs) retain at least about 80, 85 or 90% identity to a human germline sequence selected from those listed in FIG. 1 of U.S. Pat. No. 7,657,380, which Figure and Legend is incorporated by reference in its entirety herein. Thus, for example, the identical CDRs as described herein can be combined with different framework sequences from human germline sequences, as long as the framework regions retain at least 80, 85 or 90% identity to a human germline sequence selected from those listed in FIG. 1 of U.S. Pat. No. 7,657,380. Alternatively, the CDRs can have amino acid modifications (e.g. from 1, 2, 3, 4 or 5 amino acid modifications in the set of CDRs (that is, the CDRs can be modified as long as the total number of changes in the set of 6 CDRs is less than 6 amino acid modifications, with any combination of CDRs being changed; e.g. there may be one change in VLCDR1, two in VHCDR2, none in VHCDR3, etc.)), as well as having framework region changes, as long as the framework regions retain at least 80, 85 or 90% identity to a human germline sequence selected from those listed in FIG. 1 of U.S. Pat. No. 7,657,380.

[0391] 1. MSLN Antigen Binding Domains

[0392] In some embodiments, one of the ABDs binds MSLN. Suitable sets of 6 CDRs and/or VH and VL domains are depicted in FIGS. 12A-12B, 13, 14, 15, and 16A-16B. In some embodiments, the heterodimeric antibody is a 1+1 Fab-scFv-Fc or 2+1 Fab2-scFv-Fv format antibody (see, e.g., FIGS. 22A and 22B).

[0393] In one embodiment, the MSLN antigen binding domain includes the 6 CDRs (i.e., vhCDR1-3 and vlCDR1-3) of a MSLN ABD described herein, including the figures and sequence listing. In exemplary embodiments, the MSLN ABD is one of the following MSLN ABDs: MESO-A[MSLN]_H1.1_L1, MESO-B[MSLN]_H0L0, MESO-C[MSLN]_H1L1, MESO-C[MSLN]_H1.1_L1, MESO-C[MSLN]_H1.2L1, MESO-C[MSLN]_H1.3_L1, MESO-C[MSLN]_H1.4_L1, MESO-C[MSLN]_H1.5_L1, MESO-C[MSLN]_H1.6_L1, MESO-C[MSLN]_H1.7_L1, MESO-C[MSLN]_H1.8_L1, MESO-C[MSLN]_H1.9_L1, MESO-C[MSLN]_H1_L1.1, MESO-C[MSLN]_H1_L1.2, MESO-C[MSLN]_H1_L1.3, MESO-C[MSLN]_H1_L1.4, MESO-C[MSLN]_H1_L1.5, MESO-C[MSLN]_H1_L1.6, MESO-C[MSLN]_H1_L1.7, MESO-C[MSLN]_H1_L1.8, MESO-C[MSLN]_H1_L1.9, MESO-C[MSLN]_H1_L1.10, MESO-C[MSLN]_H1.5_L1.3, MESO-C[MSLN]_H1.6_L1.3, MESO-C[MSLN]_H1.12_L1.9, MESO-C[MSLN]_H1.13_L1.9, MESO-C[MSLN]_H1.3_L1.13, MESO-C[MSLN]_H1.3_L1.14, MESO-C[MSLN]_H1.3_L1.15, MESO-C[MSLN]_H1.3_L1.16, MESO-C[MSLN]_H1.3_L1.17, MESO-C[MSLN]_H1.3_L1.18, MESO-C[MSLN]_H1.3_L1.9, MESO-C[MSLN]_H1.3_L1.5, MESO-C[MSLN]_H1_L1.20, MESO-C[MSLN]_H1.12_L1.20,MESO-C[MSLN]_H1.14_L1.14, MESO-C[MSLN]_H1.15_L1.14, MESO-C[MSLN]_H1.16_L1.14, MESO-C[MSLN]_H1_L1.19, MESO-C[MSLN]_H1_L1.21, MESO-C[MSLN]_H1_L1.22, MESO-C[MSLN]_H1.12_L1.19, MESO-C[MSLN]_H1.12_L1.21, MESO-C[MSLN]_H1.12_L1.22, and MESO-C[MSLN]_H1.12_L1.9 (FIGS. 15-21). As will be appreciated by those in the art, suitable MSLN binding domains can comprise a set of 6 CDRs as depicted in the Figures, either as they are underlined or, in the case where a different numbering scheme is used as described herein and as shown in Table 2, as the CDRs that are identified using other alignments within the VH and VL sequences of those depicted in FIGS. 15-21. Suitable ABDs can also include the entire VH and VL sequences as depicted in these sequences and Figures, used as scFvs or as Fabs. In many of the embodiments herein that contain an Fv to MSLN, it is the Fab monomer that binds MSLN.

[0394] In addition to the parental CDR sets disclosed in the figures and sequence listing that form an ABD to MSLN, the disclosure provides variant CDR sets. In one embodiment, a set of 6 CDRs can have 1, 2, 3, 4 or 5 amino acid changes from the parental CDRs, as long as the MSLN ABD is still able to bind to the target antigen, as measured by at least one of a Biacore, surface plasmon resonance (SPR) and/or BLI (biolayer interferometry, e.g. Octet assay) assay, with the latter finding particular use in many embodiments.

[0395] In addition to the parental variable heavy and variable light domains disclosed herein that form an ABD to MSLN, the disclosure provides variant VH and VL domains. In one embodiment, the variant VH and VL domains each can have from 1, 2, 3, 4, 5, 6, 7, 8, 9 or 10 amino acid changes from the parental VH and VL domain, as long as the ABD is still able to bind to the target antigen, as measured at least one of a Biacore, surface plasmon resonance (SPR) and/or BLI (biolayer interferometry, e.g. Octet assay) assay, with the latter finding particular use in many embodiments. In another embodiment, the variant VH and VL are at least 90, 95, 97, 98 or 99% identical to the respective parental VH or VL, as long as the ABD is still able to bind to the target antigen, as measured by at least one of a Biacore, surface plasmon resonance (SPR) and/or BLI (biolayer interferometry, e.g. Octet assay) assay, with the latter finding particular use in many embodiments.

[0396] Some useful embodiments include: XENP16249, XENP16250, XENP16253, XENP16827, XENP31693.

[0397] In some embodiments, the present invention comprises sequences selected from: XENP31701, XENP32550, XENP32551, XENP32552, XENP32553, XENP32554, XENP32555, XENP32556, XENP32557, XENP32558, XENP32559, XENP32560, XENP32561, XENP32562, XENP32563, XENP32564, XENP32565, XENP32566, XENP32567, XENP32568, XENP32569, XENP32570, XENP32937, XENP32938, XENP32939, XENP32940, XENP32941, XENP32942, XENP32942, XENP32943, XENP32944, XENP32945, and XENP32946.

[0398] In some embodiments, present invention comprises a variable heavy chain MSLN sequence comprising one or more of the following mutations: S31G, W32Y, M50W, H52N, N53Q, D55G, I94R, T97S, E61Q, E61Y, and/or K100bR.

[0399] In some embodiments, the present invention comprises a variable light chain MSLN sequence comprising one or more of the following mutations: A25S, H27Q, D28S, G30L, S32Y, V33L, T37Q, H55E, T56S, S92Y, Y94T, Y94L, Y94V, Y94I, Y94H, D28S and Y100F.

[0400] In some embodiments, the MSLN binding domain includes a MSLN binding domain variable heavy domain selected from any of FIGS. 15-18 and 20-21. In some embodiments, the MSLN binding domain includes a MSLN binding domain variable light domain selected from any of FIGS. 15-17 and 19-21. In some embodiments, the MSLN binding domain includes a combination of any of the MSLN binding domain variable heavy domains and variable light domains in FIGS. 15-21.

[0401] In some embodiments, the MSLN binding domains include the variable heavy and variable light domain of any one of the MSLN binding domains disclosed in FIGS. 15-21.

[0402] 2. CD3 Antigen Binding Domains

[0403] In some embodiments, one of the ABDs binds CD3. Suitable sets of 6 CDRs and/or VH and VL domains, as well as scFv sequences, are depicted in FIGS. 10A-10F and the Sequence Listing. CD3 binding domain sequences that are of particular use include, but are not limited to, anti-CD3 H1.30_L1.47, anti-CD3 H1.32, anti-CD3 L1.47, anti-CD3 H1.89_L1.47, anti-CD3 H1.90_L1.47, anti-CD3 H1.33_L1.47, anti-CD3 H1.31_L1.47, anti-CD3 L1.47_H1.30, anti-CD3 L1.47_H1.30, anti-CD3 L1.47_H1.32, anti-CD3 L1.47_H1.89, anti-CD3 L1.47_H1.90, anti-CD3 L1.47_H1.33, and anti-CD3 L1.47_H1.31 as depicted in FIGS. 10A-10F.

[0404] As will be appreciated by those in the art, suitable CD3 binding domains can comprise a set of 6 CDRs as depicted in FIGS. 10A-10F, either as they are underlined or, in the case where a different numbering scheme is used as described herein and as shown in Table 2, as the CDRs that are identified using other alignments within the VH and VL sequences of those depicted in FIGS. 10A-10F. Suitable ABDs can also include the entire VH and VL sequences as depicted in these sequences and Figures, used as scFvs or as Fabs. In many of the embodiments herein that contain an Fv to CD3, it is the scFv monomer that binds CD3.

[0405] In addition to the parental CDR sets disclosed in the figures and sequence listing that form an ABD to CD3, the disclosure provides variant CDR sets. In one embodiment, a set of 6 CDRs can have 1, 2, 3, 4 or 5 amino acid changes from the parental CDRs, as long as the CD3 ABD is still able to bind to the target antigen, as measured by at least one of a Biacore, surface plasmon resonance (SPR) and/or BLI (biolayer interferometry, e.g. Octet assay) assay, with the latter finding particular use in many embodiments.

[0406] In addition to the parental variable heavy and variable light domains disclosed herein that form an ABD to CD3, the disclosure provides variant VH and VL domains. In one embodiment, the variant VH and VL domains each can have from 1, 2, 3, 4, 5, 6, 7, 8, 9 or 10 amino acid changes from the parental VH and VL domain, as long as the ABD is still able to bind to the target antigen, as measured at least one of a Biacore, surface plasmon resonance (SPR) and/or BLI (biolayer interferometry, e.g. Octet assay) assay, with the latter finding particular use in many embodiments. In another embodiment, the variant VH and VL are at least 90, 95, 97, 98 or 99% identical to the respective parental VH or VL, as long as the ABD is still able to bind to the target antigen, as measured by at least one of a Biacore, surface plasmon resonance (SPR) and/or BLI (biolayer interferometry, e.g. Octet assay) assay, with the latter finding particular use in many embodiments.

### H. Useful Embodiments

[0407] Useful embodiments include 1+1 Fab-scFv-Fc formats that comprise: a) a first monomer (the “scFv monomer”) that comprises a charged scFv linker (with the +H sequence of FIG. 5 being preferred in some embodiments), the skew variants S364K/E357Q, the ablation variants E233P/L234V/L235A/G236del/S267K, and an scFv that binds to CD3 as outlined herein; b) a second monomer (the “Fab monomer”) that comprises the skew variants L368D/K370S, the pI variants N208D/Q295E/N384D/Q418E/N421D, the ablation variants E233P/L234V/L235A/G236del/S267K, and a variable heavy domain; and c) a light chain that includes a variable light domain light domain (VL) and a constant light domain (CL), wherein numbering is according to EU numbering. In some embodiments, the variable heavy domain and variable light domain make up a MSLN binding moiety.

[0408] Other useful embodiments include 2+1 Fab₂-scFv-Fc formats that comprise: a) a first monomer (the Fab-scFv-Fc side) that comprises the skew variants S364K/E357Q, the ablation variants E233P/L234V/L235A/G236del/S267K, and a variable heavy domain that, with the variable light domain of the common light chain, makes up an Fv that binds to MSLN as outlined herein, and an scFv domain that binds to CD3; b) a second monomer (the Fab-Fc side) that comprises the skew variants L368D/K370S, the pI variants N208D/Q295E/N384D/Q418E/N421D, the ablation variants E233P/L234V/L235A/G236del/S267K, and a variable heavy domain that, with variable light domain of the common light chain, makes up an Fv that binds to MSLN as outlined herein; and c) a common light chain comprising the variable light domain and a constant light domain, where numbering is according to EU numbering. In some embodiments, the common light chain and variable heavy domains on each monomer form MSLN binding domains.

[0409] Some useful embodiments include: XENP16248, XENP16833, XENP31697, XENP32550, XENP32551, XENP32552, XENP32553, XENP32554, XENP32555, XENP32556, XENP32557, XENP32558, XENP32559, XENP32560, XENP32561, XENP32562, XENP32563, XENP32564, XENP32565, XENP32566, XENP32567, XENP32568, XENP32569, XENP32570, XENP32937, XENP32938, XENP32939, XENP32940, XENP32941, XENP32942, XENP32943, XENP32944, XENP32945, XENP32946, XENP33888, XENP33889, XENP30764, XENP30765, XENP31701, XENP33969, XENP33971, XENP33973, XENP16251, XENP16834, XENP16252, and XENP 16835.

[0410] Other useful embodiments include: XENP31063, XENP31067, XENP31705, XENP31451, XENP31452, XENP31713, XENP31064, XENP31068, XENP31709, ENP32744, XENP32747, XENP32750, XENP32851, XENP31453, XENP31454, XENP31717, XENP32745, XENP32748, XENP32751, XENP32852, XENP32947, XENP32948, XENP32949, XENP32950, XENP32951, XENP33366, XENP33367, XENP33460, XENP33461, XENP33462, XENP33463, XENP33464, XENP33465, XENP33466, XENP33467, XENP33968, XENP33970, XENP33972, XENP34155, XENP34156, XENP34157, XENP34158, XENP31455, XENP31456, XENP32249, XENP32250, XENP32251, XENP32746, XENP32749, XENP32752, XENP32853, XENP33974, XENP33975, XENP33976, XENP33977, XENP33978, XENP33979, XENP33980, XENP34151, XENP34152, XENP34153, XENP34154, XENP34159, XENP34160, XENP34161, and XENP34162.

[0411] Some useful embodiments include: XENP16249, XENP16250, XENP16253, XENP16827, XENP31693.

[0412] In some embodiments, the present invention comprises sequences selected from: XENP31701, XENP32550, XENP32551, XENP32552, XENP32553, XENP32554, XENP32555, XENP32556, XENP32557, XENP32558, XENP32559, XENP32560, XENP32561, XENP32562, XENP32563, XENP32564, XENP32565, XENP32566, XENP32567, XENP32568, XENP32569, XENP32570, XENP32937, XENP32938, XENP32939, XENP32940, XENP32941, XENP32942, XENP32942, XENP32943, XENP32944, XENP32945, and XENP32946.

[0413] In some embodiments, present invention comprises a variable heavy chain MSLN sequence comprising one or more of the following mutations: S31G, W32Y, M50W, H52N, N53Q, D55G, I94R, T97S, E61Q, E61Y, and/or K100bR.

[0414] In some embodiments, the present invention comprises a variable light chain MSLN sequence comprising one or more of the following mutations: A25S, H27Q, D28S, G30L, S32Y, V33L, T37Q, H55E, T56S, S92Y, Y94T, Y94L, Y94V, Y94I, Y94H, D28S and Y100F.

[0415] In some embodiments, the present invention comprises a MSLN binding domain that includes a MSLN binding domain variable heavy domain selected from any of FIGS. 15-18 and 20-21. In some embodiments, the present invention comprises a MSLN binding domain that includes a MSLN binding domain variable light domain selected from any of FIGS. 15-17 and 19-21. In some embodiments, the present invention comprises a MSLN binding domain that includes a combination of any of the MSLN binding domain variable heavy domains and variable light domains in FIGS. 15-21.

[0416] In some embodiments, the MSLN binding domains include the variable heavy and variable light domain of any one of the MSLN binding domains disclosed in FIGS. 15-21.

### VI. Nucleic Acids of the Invention

[0417] The disclosure further provides nucleic acid compositions encoding the anti-MSLN antibodies provided herein, including, but not limited to, anti-MSLN x anti-CD3 bispecific antibodies and MSLN monospecific antibodies.

[0418] As will be appreciated by those in the art, the nucleic acid compositions will depend on the format and scaffold of the heterodimeric protein. Thus, for example, when the format requires three amino acid sequences, such as for the 1+1 Fab-scFv-Fc format (e.g. a first amino acid monomer comprising an Fc domain and a scFv, a second amino acid monomer comprising a heavy chain and a light chain), three nucleic acid sequences can be incorporated into one or more expression vectors for expression. Similarly, some formats (e.g. dual scFv formats such as disclosed in FIG. 1) only two nucleic acids are needed; again, they can be put into one or two expression vectors.

[0419] As is known in the art, the nucleic acids encoding the components of the antibodies described herein can be incorporated into expression vectors as is known in the art, and depending on the host cells used to produce the heterodimeric antibodies described herein. Generally the nucleic acids are operably linked to any number of regulatory elements (promoters, origin of replication, selectable markers, ribosomal binding sites, inducers, etc.). The expression vectors can be extra-chromosomal or integrating vectors.

[0420] The nucleic acids and/or expression vectors of the antibodies described herein are then transformed into any number of different types of host cells as is well known in the art, including mammalian, bacterial, yeast, insect and/or fungal cells, with mammalian cells (e.g. CHO cells), finding use in many embodiments.

[0421] In some embodiments, nucleic acids encoding each monomer and the optional nucleic acid encoding a light chain, as applicable depending on the format, are each contained within a single expression vector, generally under different or the same promoter controls. In embodiments of particular use in the antibodies described herein, each of these two or three nucleic acids are contained on a different expression vector. As shown herein and in 62/025,931, hereby incorporated by reference, different vector ratios can be used to drive heterodimer formation. That is, surprisingly, while the proteins comprise first monomer:second monomer:light chains (in the case of many of the embodiments herein that have three polypeptides comprising the heterodimeric antibody) in a 1:1:2 ratio, these are not the ratios that give the best results.

[0422] The heterodimeric antibodies described herein are made by culturing host cells comprising the expression vector(s) as is well known in the art. Once produced, traditional antibody purification steps are done, including an ion exchange chromatography step. As discussed herein, having the pIs of the two monomers differ by at least 0.5 can allow separation by ion exchange chromatography or isoelectric focusing, or other methods sensitive to isoelectric point. That is, the inclusion of pI substitutions that alter the isoelectric point (p1) of each monomer so that such that each monomer has a different pI and the heterodimer also has a distinct p1, thus facilitating isoelectric purification of the “1+1 Fab-scFv-Fc” and “2+1” heterodimers (e.g., anionic exchange columns, cationic exchange columns). These substitutions also aid in the determination and monitoring of any contaminating dual scFv-Fc and mAb homodimers post-purification (e.g., IEF gels, cIEF, and analytical IEX columns).

### VII. Biological and Biochemical Functionality of the Heterodimeric Bispecific Antibodies

[0423] Generally the bispecific MSLN x CD3 antibodies described herein are administered to patients with cancer, and efficacy is assessed, in a number of ways as described herein. Thus, while standard assays of efficacy can be run, such as cancer load, size of tumor, evaluation of presence or extent of metastasis, etc., immuno-oncology treatments can be assessed on the basis of immune status evaluations as well. This can be done in a number of ways, including both in vitro and in vivo assays.

### VIII. Treatments

[0424] Once made, the compositions of the antibodies described herein find use in a number of applications. MSLN is highly expressed in renal cell carcinoma, accordingly, the heterodimeric compositions of the antibodies described herein find use in the treatment of such MSLN positive cancers.

### IX. Antibody Compositions for In Vivo Administration

[0425] Formulations of the antibodies used in accordance with the antibodies described herein are prepared for storage by mixing an antibody having the desired degree of purity with optional pharmaceutically acceptable carriers, excipients or stabilizers (Remington's Pharmaceutical Sciences 16th edition, Osol, A. Ed. [1980]), in the form of lyophilized formulations or aqueous solutions. Acceptable carriers, excipients, or stabilizers are nontoxic to recipients at the dosages and concentrations employed, and include buffers such as phosphate, citrate, and other organic acids; antioxidants including ascorbic acid and methionine; preservatives (such as octadecyldimethylbenzyl ammonium chloride; hexamethonium chloride; benzalkonium chloride, benzethonium chloride; phenol, butyl or benzyl alcohol; alkyl parabens such as methyl or propyl paraben; catechol; resorcinol; cyclohexanol; 3-pentanol; and m-cresol); low molecular weight (less than about 10 residues) polypeptides; proteins, such as serum albumin, gelatin, or immunoglobulins; hydrophilic polymers such as polyvinylpyrrolidone; amino acids such as glycine, glutamine, asparagine, histidine, arginine, or lysine; monosaccharides, disaccharides, and other carbohydrates including glucose, mannose, or dextrins; chelating agents such as EDTA; sugars such as sucrose, mannitol, trehalose or sorbitol; salt-forming counter-ions such as sodium; metal complexes (e.g. Zn-protein complexes); and/or non-ionic surfactants such as TWEEN™, PLURONICS™ or polyethylene glycol (PEG).

### X. Administrative Modalities

[0426] The antibodies and chemotherapeutic agents described herein are administered to a subject, in accord with known methods, such as intravenous administration as a bolus or by continuous infusion over a period of time.

### XI. Treatment Modalities

[0427] In the methods described herein, therapy is used to provide a positive therapeutic response with respect to a disease or condition. By “positive therapeutic response” is intended an improvement in the disease or condition, and/or an improvement in the symptoms associated with the disease or condition. For example, a positive therapeutic response would refer to one or more of the following improvements in the disease: (1) a reduction in the number of neoplastic cells; (2) an increase in neoplastic cell death; (3) inhibition of neoplastic cell survival; (5) inhibition (i.e., slowing to some extent, preferably halting) of tumor growth; (6) an increased patient survival rate; and (7) some relief from one or more symptoms associated with the disease or condition.

[0428] Positive therapeutic responses in any given disease or condition can be determined by standardized response criteria specific to that disease or condition. Tumor response can be assessed for changes in tumor morphology (i.e., overall tumor burden, tumor size, and the like) using screening techniques such as magnetic resonance imaging (MM) scan, x-radiographic imaging, computed tomographic (CT) scan, bone scan imaging, endoscopy, and tumor biopsy sampling including bone marrow aspiration (BMA) and counting of tumor cells in the circulation.

[0429] In addition to these positive therapeutic responses, the subject undergoing therapy may experience the beneficial effect of an improvement in the symptoms associated with the disease.

[0430] Treatment according to the disclosure includes a “therapeutically effective amount” of the medicaments used. A “therapeutically effective amount” refers to an amount effective, at dosages and for periods of time necessary, to achieve a desired therapeutic result.

[0431] A therapeutically effective amount may vary according to factors such as the disease state, age, sex, and weight of the individual, and the ability of the medicaments to elicit a desired response in the individual. A therapeutically effective amount is also one in which any toxic or detrimental effects of the antibody or antibody portion are outweighed by the therapeutically beneficial effects.

[0432] A “therapeutically effective amount” for tumor therapy may also be measured by its ability to stabilize the progression of disease. The ability of a compound to inhibit cancer may be evaluated in an animal model system predictive of efficacy in human tumors.

[0433] Alternatively, this property of a composition may be evaluated by examining the ability of the compound to inhibit cell growth or to induce apoptosis by in vitro assays known to the skilled practitioner. A therapeutically effective amount of a therapeutic compound may decrease tumor size, or otherwise ameliorate symptoms in a subject. One of ordinary skill in the art would be able to determine such amounts based on such factors as the subject's size, the severity of the subject's symptoms, and the particular composition or route of administration selected.

[0434] Dosage regimens are adjusted to provide the optimum desired response (e.g., a therapeutic response). For example, a single bolus may be administered, several divided doses may be administered over time or the dose may be proportionally reduced or increased as indicated by the exigencies of the therapeutic situation. Parenteral compositions may be formulated in dosage unit form for ease of administration and uniformity of dosage. Dosage unit form as used herein refers to physically discrete units suited as unitary dosages for the subjects to be treated; each unit contains a predetermined quantity of active compound calculated to produce the desired therapeutic effect in association with the required pharmaceutical carrier.

[0435] The specification for the dosage unit forms of the disclosure are dictated by and directly dependent on (a) the unique characteristics of the active compound and the particular therapeutic effect to be achieved, and (b) the limitations inherent in the art of compounding such an active compound for the treatment of sensitivity in individuals.

[0436] The efficient dosages and the dosage regimens for the bispecific antibodies described herein depend on the disease or condition to be treated and may be determined by the persons skilled in the art.

[0437] An exemplary, non-limiting range for a therapeutically effective amount of an bispecific antibody used in the antibodies described herein is about 0.1-100 mg/kg.

[0438] All cited references are herein expressly incorporated by reference in their entirety.

[0439] Whereas particular embodiments of the disclosure have been described above for purposes of illustration, it will be appreciated by those skilled in the art that numerous variations of the details may be made without departing from the invention as described in the appended claims.

### EXAMPLES

[0440] Examples are provided below to illustrate the antibodies described herein. These examples are not meant to constrain the antibodies described herein to any particular application or theory of operation. For all constant region positions discussed in the antibodies described herein, numbering is according to the EU index as in Kabat (Kabat et al., 1991, Sequences of Proteins of Immunological Interest, 5th Ed., United States Public Health Service, National Institutes of Health, Bethesda, entirely incorporated by reference). Those skilled in the art of antibodies will appreciate that this convention consists of nonsequential numbering in specific regions of an immunoglobulin sequence, enabling a normalized reference to conserved positions in immunoglobulin families. Accordingly, the positions of any given immunoglobulin as defined by the EU index will not necessarily correspond to its sequential sequence.

[0441] General and specific scientific techniques are outlined in US Publications 2015/0307629, 2014/0288275 and WO2014/145806, all of which are expressly incorporated by reference in their entirety and particularly for the techniques outlined therein.

### Example 1

### Identifying Surrogates for MSLN-Expressing Tumors

[0442] To ensure cell line with biologically valid MSLN antigen densities were used to inform the development of the novel anti-MSLN x anti-CD3 bispecific antibodies of the invention, the expression of MSLN on cancer cell lines was correlated to 191 biopsy cores of serous and mucinous ovarian cancer tissues by IHC to identify surrogate cell lines to use in research and development of the novel bispecific antibodies of the invention. Illustrative IHC of biopsy cores are depicted in FIG. 11, and samples were qualitatively scored in-house on a scale of 0-3 with 0 representing little to no MSLN expression and 3 representing high MSLN expression (herein referred to as IHC score; breakdown of score for each core is depicted in FIG. 12). Based on the results, it was determined that the novel bispecific antibodies of the invention should target score 3 and score 2 cell lines as they represent 80% of the patient segment and should not target score 1 cell lines as they resembles normal tissue. Next, endogenous MSLN expression on cancer cell lines were investigated by IHC and flow cytometry, data for which are depicted in FIG. 13. MSLN-transfected A549 cells were found to stain as intensely as ovarian cancer tumors expressing high amounts of MSLN (data not shown). OVCAR-8 cancer cells and ASPC-1 cells represent high and medium MSLN-expressing tumors (score 3 or 2 by IHC). Finally, SKOV3, HT29, MCF7, Huh7, and A549 (parental) cancer cells were found to have MSLN-expression level correlating to non-cancer adjacent tissues and therefore identified as appropriate surrogates of normal tissues.

### Example 2

### Binding Domains

[0443] 2A: CD3 Binding Domains

[0444] Sequences for CD3 binding domains having different CD3 binding affinities are depicted in FIG. 10.

[0445] 2B: MSLN Binding Domains

[0446] The variable regions of anti-human PSMA binding domains designated MSLN-A, MSLN-B, and MSLN-C are depicted in FIG. 15-17.

[0447] 2B(a): Tuning MSLN-C Binding Affinity for MSLN

[0448] Variants of MESO-C were engineered by introducing point substitutions into the variable heavy region (VH) and the variable light region (VL) to generate 11 VH variants and 16 VL variants (sequences for which are depicted in FIG. 18 as H1.1-H1.13 and in FIG. 19 as L1.1-L1.18). An additional 4 VL variants were generated by combining useful point substitutions (sequences for which are depicted in FIG. 19 as L1.19-L1.22). WT and variant variable heavy regions were paired with WT and variant variable light regions to generate variant variable regions (Fvs) which were produced in the context of anti-MSLN x anti-CD3 bispecific antibodies. The bispecific antibodies were screened for MSLN binding affinity using Octet, a BioLayer Interferometry (BLI)-based method. Experimental steps for Octet generally include the following: Immobilization (capture of ligand to a biosensor); Association (dipping of ligand-coated biosensors into wells containing the analyte); and Dissociation (returning of biosensors to well containing buffer). In an initial screening, anti-human Fc sensors were used to capture the bispecific mAbs and dipped into human MSLN antigen (one concentration to screen large library). The resulting dissociation constant of illustrative variants (K_{D}), association rate (kₐ), dissociation rate (k_{d}), as well as sensorgram response are depicted in FIG. 20. In further screening of favorite variants identified in the initial screen (and combination variants), bispecific mAbs were dipped into multiple concentrations of human MSLN antigen, data for which are depicted in FIG. 21 (from various screens).

[0449] 2C: Engineering Anti-MSLN x Anti-CD3 Bispecific Antibodies (bsAbs)

[0450] A number of formats for αMSLN x αCD3 bispecific antibodies (bsAbs) were conceived, illustrative formats for which are outlined below and in FIG. 22.

[0451] One such format is the 1+1 Fab-scFv-Fc format which comprises a single-chain Fv (“scFv”) covalently attached to a first heterodimeric Fc domain, a heavy chain variable region (VH) covalently attached to a complementary second heterodimeric Fc domain, and a light chain (LC) transfected separately so that a Fab domain is formed with the variable heavy domain.

[0452] Another format is the 2+1 Fab₂-scFv-Fc format which comprises a VH domain covalently attached to a CH1 domain covalently attached to an scFv covalently attached to a first heterodimeric Fc domain (VH-CH1-scFv-Fc), a VH domain covalently attached to a complementary second heterodimeric Fc domain, and a LC transfected separately so that Fab domains are formed with the VH domains.

[0453] DNA encoding chains of the αMSLN x αCD3 bsAbs were generated by standard gene synthesis followed by isothermal cloning (Gibson assembly) or subcloning into a pTT5 expression vector containing fusion partners (e.g. domain linkers as depicted in FIG. 6 and/or backbones as depicted in FIGS. 7-9). DNA was transfected into HEK293E cells for expression. Sequences for illustrative αMLSN x αCD3 bsAbs (based on binding domains as described in Example 2B) in the 1+1 Fab-scFv-Fc format and in the 2+1 Fab2-scFv-Fc format are depicted respectively in FIGS. 23-32. A number of formats for αMSLN x αCD3 bispecific antibodies (bsAbs) were conceived, illustrative formats for which are outlined below and in FIG. 19.

[0454] One such format is the 1+1 Fab-scFv-Fc format which comprises a single-chain Fv (“scFv”) covalently attached to a first heterodimeric Fc domain, a heavy chain variable region (VH) covalently attached to a complementary second heterodimeric Fc domain, and a light chain (LC) transfected separately so that a Fab domain is formed with the variable heavy domain.

[0455] Another format is the 2+1 Fab₂-scFv-Fc format which comprises a VH domain covalently attached to a CH1 domain covalently attached to an scFv covalently attached to a first heterodimeric Fc domain (VH-CH1-scFv-Fc), a VH domain covalently attached to a complementary second heterodimeric Fc domain, and a LC transfected separately so that Fab domains are formed with the VH domains.

[0456] DNA encoding chains of the αMSLN x αCD3 bsAbs were generated by standard gene synthesis followed by isothermal cloning (Gibson assembly) or subcloning into a pTT5 expression vector containing fusion partners (e.g. domain linkers as depicted in FIG. 6 and/or backbones as depicted in FIGS. 7-9). DNA was transfected into HEK293E cells for expression. Sequences for illustrative αMLSN x αCD3 bsAbs (based on binding domains as described in Example 2B) in the 1+1 Fab-scFv-Fc format and in the 2+1 Fab2-scFv-Fc format are depicted respectively in FIGS. 20-29.

### Example 3

### Tuning Anti-MSLN x Anti-CD3 bsAbs to Enhance Selectivity and Therapeutic Index

[0457] 3A: Higher Valency MSLN Binding Promotes T Cell Activity

[0458] In initial investigations, the activity of anti-MSLN x anti-CD3 bsAbs in the 1+1 Fab-scFv-Fc format were compared to anti-MSLN x anti-CD3 bsAbs in the 2+1 Fab₂-scFv-Fc format. Test articles were incubated with 10,000 Kuramochi cells and 100,000 human T cells. 5 μL anti-human CD107a-APC were added. Cells were incubated for 24 hours at 37° C., and analyzed by flow cytometry, data for which are presented in FIGS. 33-34. Collectively, the data show that anti-MSLN x anti-CD3 bsAbs in the 2+1 Fab₂-scFv-Fc format promoted activity of CD8⁺ and CD4⁺ T cells (as indicated by degranulation with CD107a, CD25 expression, and CD69 expression) more potently than corresponding 1+1 Fab-scFv-Fc bsAbs.

[0459] 3B: Tuning MSLN Binding Affinity

[0460] 3B(a): Reducing MSLN Binding Affinity Promotes Avid Binding in the 2+1 Format

[0461] Next, the effect of MSLN binding affinity was investigated. 100,000 OVCAR8 (MSLN^{high}) cells were treated with the indicated concentrations of the indicated test articles. Binding was detected using A647-labelled anti-human Fc mAb, data for which are shown in FIG. 35. The data show that as the MSLN binding affinity is decreased, the 2+1 Fab_{z}-scFv-Fc format provides more potent binding to OVCAR8 cells than the 1+1 Fab-scFv-Fc format. This indicates that reduction of MSLN binding affinity promotes avid binding by bsAbs in the 2+1 Fab₂-scFv-Fc format to MSLN^{high} cells, as is readily observable for each of H1_L1.9 (3.9 nM K_{D}), H1.3_L1 (9.2 nM K_{D}), H1.12_L1.9 (10.2 nM K_{D}), and H1_L1.5 (-12.8 nM K_{D}). Further, XENP32852 and XENP32853 which differ only in CD3 binding affinity have identical binding to OVCAR8 cells confirming that avid binding is due to the MSLN binding domain.

[0462] 3B(b): Reducing MSLN Binding Affinity Enables Selectivity for Higher Antigen Density Cell Lines

[0463] Having determined that reducing MSLN binding affinity promoted avid binding in the 2+1 Fab₂-scFv-Fc format to MSLN ^{high} cells, the next step was to determine whether this subsequently conveys selective activity on higher density cell lines.

[0464] Accordingly in a first experiment, the 2+1 Fab₂-scFv-Fc bsAbs investigated in Example 3B(a) were further probed in an RTCC assay. Cancer cells with varying MSLN densities (A549, HT29, MCF7, OVCAR8, and SKOV3) were transduced to constitutively express luciferase. Luciferase released from dead cancer cells rapidly degrades in assay media, so live target cells can be quantified based on luminescence readout. The luciferase-transduced cancer cells were incubated with T cells (effector:target ratio 10:1) for 24 hours. Test articles were added to the cells and incubated for 48 additional hours. Following incubation, Bio-Glo Luciferase reagent (Promega, Madison, Wis.) was added and plates were read with the Envision Reader on luminescence setting. % RTCC was calculated by 1−(Raw Value/PBS AVG))*100. Data depicting dose-dependent induction of RTCC by the test articles on the various cells lines are depicted in FIG. 36. The data show that at high MSLN binding affinity, the 2+1 bsAbs induced potent RTCC on MSLN^{high} OVCAR8 cell lines as well as MSLN^{low} SKOV3 and HT29 cell lines. However, as MSLN binding affinity is reduced, the RTCC potency of the 2+1 bsAbs on the MSLN^{low} cell lines is reduced. However, there is room for further improvement in selectivity for MSLN^{med/high} cells.

[0465] Accordingly in another set of experiments, 2+1 Fab₂-scFv-Fc anti-MSLN x anti-CD3 bsAbs having further reduced MSLN affinity were explored. In one set of experiments, RTCC was assessed as described above using luciferase-transduced cancer cells. In a second experiment, RTCC was assessed using xCELLigence Real Time Cell Analysis instrument (ACEA Biosciences, San Diego, Calif.). Data from each experiment are depicted in FIGS. 37-38. The data show that XENP33366 having 90.4 nM MSLN binding affinity enabled improved selectivity for MSLN^{high} OVCAR8, as indicated by reduced potency in killing of SKOV3 cells and more potent killing of OVCAR8. XENP33367 having 246 nM MSLN binding affinity demonstrated little to no RTCC activity on MSLN^{low} cells, but was also less potent on OVCAR8 than XENP33366. Notably, the data also show that even with the drastic reduction in MSLN binding affinity to enhance selectivity, RTCC activity on ASPC-1, a cancer cell line with 36K surface MSLN expression and a lower cancer IHC score (Score 2), was not compromised.

[0466] In yet another set of experiments, T cells were treated with a dose titration of the above test articles and various cancer cell lines (effector:target ratio 10:1) for 24 hours and assessed for proliferation, degranulation, and activation (as indicated by percentage CD3⁺ T cells respectively staining for Ki67, CD107a, and CD25), data for which are depicted in FIGS. 39-41. Notably, each of the three bispecific antibodies enabled proliferation in the presence of Score 3 and Score 2 cell lines, but not in the presence of Score 1 cell lines. Consistent with the RTCC data above, reduction in MSLN binding affinity reduced T cell degranulation and activation in the presence of Score 1 cell lines. Importantly even at drastically reduced MSLN binding affinity (i.e. for XENP33367), T cell proliferation, degranulation, and activation were not compromised for Score 3 and Score 2 cancer cell lines.

[0467] 3C: Tuning CD3 Binding Affinity

[0468] Another approach explored for optimizing the anti-MSLN x anti-CD3 bispecific antibodies was tuning CD3 binding affinity. Accordingly, anti-MSLN x anti-CD3 bsAbs in the 2+1 Fab₂-scFv-Fc format having either CD3 High-Int#1 or CD3 High-Int#2 binding domains were investigated in an RTCC assay. RTCC was assessed as described above using luciferase-transduced cancer cells, data for which are depicted in FIG. 42. Collectively, the data show that reducing the CD3 binding affinity may also convey selective targeting to high expressing cell lines (even with higher affinity MSLN binding).

[0469] While exemplary embodiments of the present invention have been shown and described herein, it will be obvious to those skilled in the art that such embodiments are provided by way of example only. Numerous variations, changes, and substitutions will now occur to those skilled in the art without departing from the invention. It should be understood that various alternatives to the embodiments of the invention described herein may be employed in practicing the invention. It is intended that the following claims define the scope of the invention and that methods and structures within the scope of these claims and their equivalents be covered thereby.

The application's sequence listing, which the Patent Office published only in electronic form, follows.

SEQUENCE LISTING (618 sequences)

SEQ ID NO: 1 - protein, 20 aa, Artificial Sequence
  Description of Artificial Sequence: Synthetic peptide
GKPGSGKPGSGKPGSGKPGS

SEQ ID NO: 2 - protein, 5 aa, Artificial Sequence
  Description of Artificial Sequence: Synthetic peptide
GGGGS

SEQ ID NO: 3 - protein, 5 aa, Artificial Sequence
  Description of Artificial Sequence: Synthetic peptide
  See specification as filed for detailed description of substitutions and preferred embodiments
GSGGS

SEQ ID NO: 4 - protein, 4 aa, Artificial Sequence
  Description of Artificial Sequence: Synthetic peptide
  See specification as filed for detailed description of substitutions and preferred embodiments
GGGS

SEQ ID NO: 5 - protein, 15 aa, Artificial Sequence
  Description of Artificial Sequence: Synthetic peptide
GGGGSGGGGSGGGGS

SEQ ID NO: 6 - protein, 18 aa, Artificial Sequence
  Description of Artificial Sequence: Synthetic peptide
GSTSGSGKPGSGEGSTKG

SEQ ID NO: 7 - protein, 14 aa, Artificial Sequence
  Description of Artificial Sequence: Synthetic peptide
IRPRAIGGSKPRVA

SEQ ID NO: 8 - protein, 15 aa, Artificial Sequence
  Description of Artificial Sequence: Synthetic peptide
GKGGSGKGGSGKGGS

SEQ ID NO: 9 - protein, 15 aa, Artificial Sequence
  Description of Artificial Sequence: Synthetic peptide
GGKGSGGKGSGGKGS

SEQ ID NO: 10 - protein, 15 aa, Artificial Sequence
  Description of Artificial Sequence: Synthetic peptide
GGGKSGGGKSGGGKS

SEQ ID NO: 11 - protein, 15 aa, Artificial Sequence
  Description of Artificial Sequence: Synthetic peptide
GKGKSGKGKSGKGKS

SEQ ID NO: 12 - protein, 15 aa, Artificial Sequence
  Description of Artificial Sequence: Synthetic peptide
GGGKSGGKGSGKGGS

SEQ ID NO: 13 - protein, 15 aa, Artificial Sequence
  Description of Artificial Sequence: Synthetic peptide
GKPGSGKPGSGKPGS

SEQ ID NO: 14 - protein, 20 aa, Artificial Sequence
  Description of Artificial Sequence: Synthetic peptide
GKGKSGKGKSGKGKSGKGKS

SEQ ID NO: 15 - protein, 20 aa, Artificial Sequence
  Description of Artificial Sequence: Synthetic peptide
GGGGSGGGGSGGGGSGGGGS

SEQ ID NO: 16 - protein, 14 aa, Artificial Sequence
  Description of Artificial Sequence: Synthetic peptide
STAGDTHLGGEDFD

SEQ ID NO: 17 - protein, 15 aa, Artificial Sequence
  Description of Artificial Sequence: Synthetic peptide
GEGGSGEGGSGEGGS

SEQ ID NO: 18 - protein, 15 aa, Artificial Sequence
  Description of Artificial Sequence: Synthetic peptide
GGEGSGGEGSGGEGS

SEQ ID NO: 19 - protein, 15 aa, Artificial Sequence
  Description of Artificial Sequence: Synthetic peptide
GGGESGGGESGGGES

SEQ ID NO: 20 - protein, 15 aa, Artificial Sequence
  Description of Artificial Sequence: Synthetic peptide
GEGESGEGESGEGES

SEQ ID NO: 21 - protein, 15 aa, Artificial Sequence
  Description of Artificial Sequence: Synthetic peptide
GGGESGGEGSGEGGS

SEQ ID NO: 22 - protein, 20 aa, Artificial Sequence
  Description of Artificial Sequence: Synthetic peptide
GEGESGEGESGEGESGEGES

SEQ ID NO: 23 - protein, 19 aa, Artificial Sequence
  Description of Artificial Sequence: Synthetic peptide
PRGASKSGSASQTGSAPGS

SEQ ID NO: 24 - protein, 19 aa, Artificial Sequence
  Description of Artificial Sequence: Synthetic peptide
GTAAAGAGAAGGAAAGAAG

SEQ ID NO: 25 - protein, 19 aa, Artificial Sequence
  Description of Artificial Sequence: Synthetic peptide
GTSGSSGSGSGGSGSGGGG

SEQ ID NO: 26 - protein, 10 aa, Artificial Sequence
  Description of Artificial Sequence: Synthetic peptide
GGGGSGGGGS

SEQ ID NO: 27 - protein, 25 aa, Artificial Sequence
  Description of Artificial Sequence: Synthetic peptide
GGGGSGGGGSGGGGSGGGGSGGGGS

SEQ ID NO: 28 - protein, 30 aa, Artificial Sequence
  Description of Artificial Sequence: Synthetic polypeptide
GGGGSGGGGSGGGGSGGGGSGGGGSGGGGS

SEQ ID NO: 29 - protein, 35 aa, Artificial Sequence
  Description of Artificial Sequence: Synthetic polypeptide
GGGGSGGGGSGGGGSGGGGSGGGGSGGGGSGGGGS

SEQ ID NO: 30 - protein, 5 aa, Artificial Sequence
  Description of Artificial Sequence: Synthetic peptide
GGGGA

SEQ ID NO: 31 - protein, 10 aa, Artificial Sequence
  Description of Artificial Sequence: Synthetic peptide
GGGGAGGGGA

SEQ ID NO: 32 - protein, 15 aa, Artificial Sequence
  Description of Artificial Sequence: Synthetic peptide
GGGGAGGGGAGGGGA

SEQ ID NO: 33 - protein, 20 aa, Artificial Sequence
  Description of Artificial Sequence: Synthetic peptide
GGGGAGGGGAGGGGAGGGGA

SEQ ID NO: 34 - protein, 25 aa, Artificial Sequence
  Description of Artificial Sequence: Synthetic peptide
GGGGAGGGGAGGGGAGGGGAGGGGA

SEQ ID NO: 35 - protein, 30 aa, Artificial Sequence
  Description of Artificial Sequence: Synthetic polypeptide
GGGGAGGGGAGGGGAGGGGAGGGGAGGGGA

SEQ ID NO: 36 - protein, 35 aa, Artificial Sequence
  Description of Artificial Sequence: Synthetic polypeptide
GGGGAGGGGAGGGGAGGGGAGGGGAGGGGAGGGGA

SEQ ID NO: 37 - protein, 30 aa, Artificial Sequence
  Description of Artificial Sequence: Synthetic polypeptide
DPALVHQRPAPPGGGGSGGGGSGGGGSGGG

SEQ ID NO: 38 - protein, 5 aa, Artificial Sequence
  Description of Artificial Sequence: Synthetic peptide
GKPGS

SEQ ID NO: 39 - protein, 25 aa, Artificial Sequence
  Description of Artificial Sequence: Synthetic peptide
GKPGSGKPGSGKPGSGKPGSGKPGS

SEQ ID NO: 40 - protein, 30 aa, Artificial Sequence
  Description of Artificial Sequence: Synthetic polypeptide
GKPGSGKPGSGKPGSGKPGSGKPGSGKPGS

SEQ ID NO: 41 - protein, 5 aa, Artificial Sequence
  Description of Artificial Sequence: Synthetic peptide
GGGES

SEQ ID NO: 42 - protein, 9 aa, Artificial Sequence
  Description of Artificial Sequence: Synthetic peptide
KTHTCPPCP

SEQ ID NO: 43 - protein, 15 aa, Artificial Sequence
  Description of Artificial Sequence: Synthetic peptide
EPKSSDKTHTCPPCP

SEQ ID NO: 44 - protein, 19 aa, Artificial Sequence
  Description of Artificial Sequence: Synthetic peptide
GGGGSGGGGSKTHTCPPCP

SEQ ID NO: 45 - protein, 19 aa, Artificial Sequence
  Description of Artificial Sequence: Synthetic peptide
GKPGSGKPGSKTHTCPPCP

SEQ ID NO: 46 - protein, 14 aa, Artificial Sequence
  Description of Artificial Sequence: Synthetic peptide
GKPGSKTHTCPPCP

SEQ ID NO: 47 - protein, 329 aa, Artificial Sequence
  Description of Artificial Sequence: Synthetic polypeptide
  1 + 1 Fab-scFv-Fc Backbone 1 Fab-Fc Side
ASTKGPSVFPLAPSSKSTSGGTAALGCLVKDYFPEPVTVSWNSGALTSGVHTFPAVLQSSGLYSLSSVVTVPSSSLGTQTYICNVNHKPSDTKVDKKVEPKSCDKTHTCPPCPAPPVAGPSVFLFPPKPKDTLMISRTPEVTCVVVDVKHEDPEVKFNWYVDGVEVHNAKTKPREEEYNSTYRVVSVLTVLHQDWLNGKEYKCKVSNKALPAPIEKTISKAKGQPREPQVYTLPPSREEMTKNQVSLTCDVSGFYPSDIAVEWESDGQPENNYKTTPPVLDSDGSFFLYSKLTVDKSRWEQGDVFSCSVMHEALHNHYTQKSLSLSPGK

SEQ ID NO: 48 - protein, 231 aa, Artificial Sequence
  Description of Artificial Sequence: Synthetic polypeptide
  1 + 1 Fab-scFv-Fc Backbone 1 scFv-Fc Side
EPKSSDKTHTCPPCPAPPVAGPSVFLFPPKPKDTLMISRTPEVTCVVVDVKHEDPEVKFNWYVDGVEVHNAKTKPREEQYNSTYRVVSVLTVLHQDWLNGKEYKCKVSNKALPAPIEKTISKAKGQPREPQVYTLPPSREQMTKNQVKLTCLVKGFYPSDIAVEWESNGQPENNYKTTPPVLDSDGSFFLYSKLTVDKSRWQQGNVFSCSVMHEALHNHYTQKSLSLSPGK

SEQ ID NO: 49 - protein, 329 aa, Artificial Sequence; identical to SEQ ID NO: 47
  Description of Artificial Sequence: Synthetic polypeptide
  1 + 1 Fab-scFv-Fc Backbone 2 Fab-Fc Side

SEQ ID NO: 50 - protein, 231 aa, Artificial Sequence
  Description of Artificial Sequence: Synthetic polypeptide
  1 + 1 Fab-scFv-Fc Backbone 2 scFv-Fc Side
EPKSSDKTHTCPPCPAPPVAGPSVFLFPPKPKDTLMISRTPEVTCVVVDVKHEDPEVKFNWYVDGVEVHNAKTKPREEQYNSTYRVVSVLTVLHQDWLNGKEYKCKVSNKALPAPIEKTISKAKGQPREPQVYTLPPSREEMTKNQVKLTCLVKGFYPSDIAVEWESNGQPENNYKTTPPVLDSDGSFFLYSKLTVDKSRWQQGNVFSCSVMHEALHNHYTQKSLSLSPGK

SEQ ID NO: 51 - protein, 329 aa, Artificial Sequence
  Description of Artificial Sequence: Synthetic polypeptide
  1 + 1 Fab-scFv-Fc Backbone 3 Fab-Fc Side
ASTKGPSVFPLAPSSKSTSGGTAALGCLVKDYFPEPVTVSWNSGALTSGVHTFPAVLQSSGLYSLSSVVTVPSSSLGTQTYICNVNHKPSDTKVDKKVEPKSCDKTHTCPPCPAPPVAGPSVFLFPPKPKDTLMISRTPEVTCVVVDVKHEDPEVKFNWYVDGVEVHNAKTKPREEEYNSTYRVVSVLTVLHQDWLNGKEYKCKVSNKALPAPIEKTISKAKGQPREPQVYTLPPSREEMTKNQVSLTCEVSGFYPSDIAVEWESDGQPENNYKTTPPVLDSDGSFFLYSKLTVDKSRWEQGDVFSCSVMHEALHNHYTQKSLSLSPGK

SEQ ID NO: 52 - protein, 231 aa, Artificial Sequence; identical to SEQ ID NO: 50
  Description of Artificial Sequence: Synthetic polypeptide
  1 + 1 Fab-scFv-Fc Backbone 3 scFv-Fc Side

SEQ ID NO: 53 - protein, 329 aa, Artificial Sequence
  Description of Artificial Sequence: Synthetic polypeptide
  1 + 1 Fab-scFv-Fc Backbone 4 Fab-Fc Side
ASTKGPSVFPLAPSSKSTSGGTAALGCLVKDYFPEPVTVSWNSGALTSGVHTFPAVLQSSGLYSLSSVVTVPSSSLGTQTYICNVNHKPSDTKVDKKVEPKSCDKTHTCPPCPAPPVAGPSVFLFPPKPKDTLMISRTPEVTCVVVDVKHEDPEVKFNWYVDGVEVHNAKTKPREEEYNSTYRVVSVLTVLHQDWLNGKEYKCKVSNKALPAPIEKTISKAKGQPREPQVYTLPPSREEMTENEVSLTCLVKGFYPSDIAVEWESDGQPENNYKTTPPVLDSDGSFFLYSKLEVDKSRWEQGDVFSCSVMHEALHNHYTQKSLSLSPGK

SEQ ID NO: 54 - protein, 231 aa, Artificial Sequence
  Description of Artificial Sequence: Synthetic polypeptide
  1 + 1 Fab-scFv-Fc Backbone 4 scFv-Fc Side
EPKSSDKTHTCPPCPAPPVAGPSVFLFPPKPKDTLMISRTPEVTCVVVDVKHEDPEVKFNWYVDGVEVHNAKTKPREEQYNSTYRVVSVLTVLHQDWLNGKEYKCKVSNKALPAPIEKTISKAKGQPREPQVYTLPPSREEMTKNQVSLTCLVKGFYPSDIAVEWESNGQPENNYKTTPPVLDSKGSFFLYSKLTVDKSRWQQGNVFSCSVMHEALHNHYTQKSLSLSPGK

SEQ ID NO: 55 - protein, 329 aa, Artificial Sequence
  Description of Artificial Sequence: Synthetic polypeptide
  1 + 1 Fab-scFv-Fc Backbone 5 Fab-Fc Side
ASTKGPSVFPLAPSSKSTSGGTAALGCLVKDYFPEPVTVSWNSGALTSGVHTFPAVLQSSGLYSLSSVVTVPSSSLGTQTYICNVNHKPSDTKVDKKVEPKSCDKTHTCPPCPAPPVAGPSVFLFPPKPKDTLMISRTPEVTCVVVDVKHEDPEVKFNWYVDGVEVHNAKTKPREEEYNSTYRVVSVLTVLHQDWLNGKEYKCKVSNKALPAPIEKTISKAKGQPREPQVYTLPPSRDELTKNQVSLTCDVSGFYPSDIAVEWESDGQPENNYKTTPPVLDSDGSFFLYSKLTVDKSRWEQGDVFSCSVMHEALHNHYTQKSLSLSPGK

SEQ ID NO: 56 - protein, 231 aa, Artificial Sequence
  Description of Artificial Sequence: Synthetic polypeptide
  1 + 1 Fab-scFv-Fc Backbone 5 scFv-Fc Side
EPKSSDKTHTCPPCPAPPVAGPSVFLFPPKPKDTLMISRTPEVTCVVVDVKHEDPEVKFNWYVDGVEVHNAKTKPREEQYNSTYRVVSVLTVLHQDWLNGKEYKCKVSNKALPAPIEKTISKAKGQPREPQVYTLPPSRDQLTKNQVKLTCLVKGFYPSDIAVEWESNGQPENNYKTTPPVLDSDGSFFLYSKLTVDKSRWQQGNVFSCSVMHEALHNHYTQKSLSLSPGK

SEQ ID NO: 57 - protein, 329 aa, Artificial Sequence
  Description of Artificial Sequence: Synthetic polypeptide
  1 + 1 Fab-scFv-Fc Backbone 6 Fab-Fc Side
ASTKGPSVFPLAPSSKSTSGGTAALGCLVKDYFPEPVTVSWNSGALTSGVHTFPAVLQSSGLYSLSSVVTVPSSSLGTQTYICNVNHKPSDTKVDKKVEPKSCDKTHTCPPCPAPPVAGPSVFLFPPKPKDTLMISRTPEVTCVVVDVKHEDPEVKFNWYVDGVEVHNAKTKPREEEYASTYRVVSVLTVLHQDWLNGKEYKCKVSNKALPAPIEKTISKAKGQPREPQVYTLPPSREEMTKNQVSLTCDVSGFYPSDIAVEWESDGQPENNYKTTPPVLDSDGSFFLYSKLTVDKSRWEQGDVFSCSVMHEALHNHYTQKSLSLSPGK

SEQ ID NO: 58 - protein, 231 aa, Artificial Sequence
  Description of Artificial Sequence: Synthetic polypeptide
  1 + 1 Fab-scFv-Fc Backbone 6 scFv-Fc Side
EPKSSDKTHTCPPCPAPPVAGPSVFLFPPKPKDTLMISRTPEVTCVVVDVKHEDPEVKFNWYVDGVEVHNAKTKPREEQYASTYRVVSVLTVLHQDWLNGKEYKCKVSNKALPAPIEKTISKAKGQPREPQVYTLPPSREQMTKNQVKLTCLVKGFYPSDIAVEWESNGQPENNYKTTPPVLDSDGSFFLYSKLTVDKSRWQQGNVFSCSVMHEALHNHYTQKSLSLSPGK

SEQ ID NO: 59 - protein, 329 aa, Artificial Sequence
  Description of Artificial Sequence: Synthetic polypeptide
  1 + 1 Fab-scFv-Fc Backbone 7 Fab-Fc Side
ASTKGPSVFPLAPSSKSTSGGTAALGCLVKDYFPEPVTVSWNSGALTSGVHTFPAVLQSSGLYSLSSVVTVPSSSLGTQTYICNVNHKPSDTKVDKKVEPKSCDKTHTCPPCPAPPVAGPSVFLFPPKPKDTLMISRTPEVTCVVVDVKHEDPEVKFNWYVDGVEVHNAKTKPREEEYSSTYRVVSVLTVLHQDWLNGKEYKCKVSNKALPAPIEKTISKAKGQPREPQVYTLPPSREEMTKNQVSLTCDVSGFYPSDIAVEWESDGQPENNYKTTPPVLDSDGSFFLYSKLTVDKSRWEQGDVFSCSVMHEALHNHYTQKSLSLSPGK

SEQ ID NO: 60 - protein, 231 aa, Artificial Sequence
  Description of Artificial Sequence: Synthetic polypeptide
  1 + 1 Fab-scFv-Fc Backbone 7 scFv-Fc Side
EPKSSDKTHTCPPCPAPPVAGPSVFLFPPKPKDTLMISRTPEVTCVVVDVKHEDPEVKFNWYVDGVEVHNAKTKPREEQYSSTYRVVSVLTVLHQDWLNGKEYKCKVSNKALPAPIEKTISKAKGQPREPQVYTLPPSREQMTKNQVKLTCLVKGFYPSDIAVEWESNGQPENNYKTTPPVLDSDGSFFLYSKLTVDKSRWQQGNVFSCSVMHEALHNHYTQKSLSLSPGK

SEQ ID NO: 61 - protein, 327 aa, Artificial Sequence
  Description of Artificial Sequence: Synthetic polypeptide
  1 + 1 Fab-scFv-Fc Backbone 8 Fab-Fc Side
ASTKGPSVFPLAPCSRSTSESTAALGCLVKDYFPEPVTVSWNSGALTSGVHTFPAVLQSSGLYSLSSVVTVPSSSLGTKTYTCNVDHKPSDTKVDKRVESKYGPPCPPCPAPEFLGGPSVFLFPPKPKDTLMISRTPEVTCVVVDVSQEDPEVQFNWYVDGVEVHNAKTKPREEEFNSTYRVVSVLTVLHQDWLNGKEYKCKVSNKGLPSSIEKTISKAKGQPREPQVYTLPPSQEEMTKNQVSLTCDVSGFYPSDIAVEWESDGQPENNYKTTPPVLDSDGSFFLYSRLTVDKSRWEEGDVFSCSVMHEALHNHYTQKSLSLSLGK

SEQ ID NO: 62 - protein, 229 aa, Artificial Sequence
  Description of Artificial Sequence: Synthetic polypeptide
  1 + 1 Fab-scFv-Fc Backbone 8 scFv-Fc Side
ESKYGPPCPPCPAPEFLGGPSVFLFPPKPKDTLMISRTPEVTCVVVDVSQEDPEVQFNWYVDGVEVHNAKTKPREEQFNSTYRVVSVLTVLHQDWLNGKEYKCKVSNKGLPSSIEKTISKAKGQPREPQVYTLPPSQEQMTKNQVKLTCLVKGFYPSDIAVEWESNGQPENNYKTTPPVLDSDGSFFLYSRLTVDKSRWQEGNVFSCSVMHEALHNHYTQKSLSLSLGK

SEQ ID NO: 63 - protein, 326 aa, Artificial Sequence
  Description of Artificial Sequence: Synthetic polypeptide
  1 + 1 Fab-scFv-Fc Backbone 9 Fab-Fc Side
ASTKGPSVFPLAPCSRSTSESTAALGCLVKDYFPEPVTVSWNSGALTSGVHTFPAVLQSSGLYSLSSVVTVPSSNFGTQTYTCNVDHKPSDTKVDKTVERKCCVECPPCPAPPVAGPSVFLFPPKPKDTLMISRTPEVTCVVVDVSHEDPEVQFNWYVDGVEVHNAKTKPREEEFNSTFRVVSVLTVVHQDWLNGKEYKCKVSNKGLPAPIEKTISKTKGQPREPQVYTLPPSREEMTKNQVSLTCDVSGFYPSDIAVEWESDGQPENNYKTTPPMLDSDGSFFLYSKLTVDKSRWEQGDVFSCSVMHEALHNHYTQKSLSLSPGK

SEQ ID NO: 64 - protein, 228 aa, Artificial Sequence
  Description of Artificial Sequence: Synthetic polypeptide
  1 + 1 Fab-scFv-Fc Backbone 9 scFv-Fc Side
ERKCCVECPPCPAPPVAGPSVFLFPPKPKDTLMISRTPEVTCVVVDVSHEDPEVQFNWYVDGVEVHNAKTKPREEQFNSTFRVVSVLTVVHQDWLNGKEYKCKVSNKGLPAPIEKTISKTKGQPREPQVYTLPPSREQMTKNQVKLTCLVKGFYPSDIAVEWESNGQPENNYKTTPPMLDSDGSFFLYSKLTVDKSRWQQGNVFSCSVMHEALHNHYTQKSLSLSPGK

SEQ ID NO: 65 - protein, 326 aa, Artificial Sequence
  Description of Artificial Sequence: Synthetic polypeptide
  1 + 1 Fab-scFv-Fc Backbone 10 Fab-Fc Side
ASTKGPSVFPLAPCSRSTSESTAALGCLVKDYFPEPVTVSWNSGALTSGVHTFPAVLQSSGLYSLSSVVTVPSSNFGTQTYTCNVDHKPSDTKVDKTVERKCCVECPPCPAPPVAGPSVFLFPPKPKDTLMISRTPEVTCVVVDVKHEDPEVQFNWYVDGVEVHNAKTKPREEEFNSTFRVVSVLTVVHQDWLNGKEYKCKVSNKGLPAPIEKTISKTKGQPREPQVYTLPPSREEMTKNQVSLTCDVSGFYPSDIAVEWESDGQPENNYKTTPPMLDSDGSFFLYSKLTVDKSRWEQGDVFSCSVMHEALHNHYTQKSLSLSPGK

SEQ ID NO: 66 - protein, 228 aa, Artificial Sequence
  Description of Artificial Sequence: Synthetic polypeptide
  1 + 1 Fab-scFv-Fc Backbone 10 scFv-Fc Side
ERKCCVECPPCPAPPVAGPSVFLFPPKPKDTLMISRTPEVTCVVVDVKHEDPEVQFNWYVDGVEVHNAKTKPREEQFNSTFRVVSVLTVVHQDWLNGKEYKCKVSNKGLPAPIEKTISKTKGQPREPQVYTLPPSREQMTKNQVKLTCLVKGFYPSDIAVEWESNGQPENNYKTTPPMLDSDGSFFLYSKLTVDKSRWQQGNVFSCSVMHEALHNHYTQKSLSLSPGK

SEQ ID NO: 67 - protein, 329 aa, Artificial Sequence
  Description of Artificial Sequence: Synthetic polypeptide
  1 + 1 Fab-scFv-Fc Backbone 11 Fab-Fc Side
ASTKGPSVFPLAPSSKSTSGGTAALGCLVKDYFPEPVTVSWNSGALTSGVHTFPAVLQSSGLYSLSSVVTVPSSSLGTQTYICNVNHKPSDTKVDKKVEPKSCDKTHTCPPCPAPPVAGPSVFLFPPKPKDTLMISRTPEVTCVVVDVKHEDPEVKFNWYVDGVEVHNAKTKPREEEYNSTYRVVSVLTVLHQDWLNGKEYKCKVSNKALPAPIEKTISKAKGQPREPQVYTLPPSREEMTKNQVSLTCDVSGFYPSDIAVEWESDGQPENNYKTTPPVLDSDGSFFLYSKLTVDKSRWEQGDVFSCSVLHEALHSHYTQKSLSLSPGK

SEQ ID NO: 68 - protein, 231 aa, Artificial Sequence
  Description of Artificial Sequence: Synthetic polypeptide
  1 + 1 Fab-scFv-Fc Backbone 11 scFv-Fc Side
EPKSSDKTHTCPPCPAPPVAGPSVFLFPPKPKDTLMISRTPEVTCVVVDVKHEDPEVKFNWYVDGVEVHNAKTKPREEQYNSTYRVVSVLTVLHQDWLNGKEYKCKVSNKALPAPIEKTISKAKGQPREPQVYTLPPSREQMTKNQVKLTCLVKGFYPSDIAVEWESNGQPENNYKTTPPVLDSDGSFFLYSKLTVDKSRWQQGNVFSCSVLHEALHSHYTQKSLSLSPGK

SEQ ID NO: 69 - protein, 329 aa, Artificial Sequence
  Description of Artificial Sequence: Synthetic polypeptide
  1 + 1 Fab-scFv-Fc Backbone 12 Fab-Fc Side
ASTKGPSVFPLAPSSKSTSGGTAALGCLVKDYFPEPVTVSWNSGALTSGVHTFPAVLQSSGLYSLSSVVTVPSSSLGTQTYICNVNHKPSNTKVDKKVEPKSCDKTHTCPPCPAPPVAGPSVFLFPPKPKDTLMISRTPEVTCVVVDVKHEDPEVKFNWYVDGVEVHNAKTKPREEQYNSTYRVVSVLTVLHQDWLNGKEYKCKVSNKALPAPIEKTISKAKGQPREPQVYTLPPSREEMTKNQVSLTCDVAGFYPSDIAVEWESNGQPENNYKTTPPVLDSDGSFFLYSKLTVDKSRWQQGNVFSCSVMHEALHNHYTQKSLSLSPGK

SEQ ID NO: 70 - protein, 231 aa, Artificial Sequence
  Description of Artificial Sequence: Synthetic polypeptide
  1 + 1 Fab-scFv-Fc Backbone 12 scFv-Fc Side
ERKSSDKTHTCPPRPAPPVAGPSVFLFPPKPKDTLMISRTPEVTCVVVDVKHEDPEVKFKWYVDGVEVHNAKTKPREEQYNSTYRVVSVLTVLHQDWLNGKEYKCKVSNKALPAPIEKTISKAKGQPREPQVYTLPPSREQMTKNQVKLTCLVKGFYPSDIAVEWESNGQPENNYKTTPPVLDSDGSFFLYSKLTVDKSRWQQGNVFSCSVMHEALHNHYTQKSLSLSPGK

SEQ ID NO: 71 - protein, 329 aa, Artificial Sequence; identical to SEQ ID NO: 47
  Description of Artificial Sequence: Synthetic polypeptide
  2 + 1 Fab2-scFv-Fc Backbone 1 Fab-Fc Side

SEQ ID NO: 72 - protein, 216 aa, Artificial Sequence
  Description of Artificial Sequence: Synthetic polypeptide
  2 + 1 Fab2-scFv-Fc Backbone 1 Fab-scFv-Fc Side
APPVAGPSVFLFPPKPKDTLMISRTPEVTCVVVDVKHEDPEVKFNWYVDGVEVHNAKTKPREEQYNSTYRVVSVLTVLHQDWLNGKEYKCKVSNKALPAPIEKTISKAKGQPREPQVYTLPPSREQMTKNQVKLTCLVKGFYPSDIAVEWESNGQPENNYKTTPPVLDSDGSFFLYSKLTVDKSRWQQGNVFSCSVMHEALHNHYTQKSLSLSPGK

SEQ ID NO: 73 - protein, 329 aa, Artificial Sequence; identical to SEQ ID NO: 47
  Description of Artificial Sequence: Synthetic polypeptide
  2 + 1 Fab2-scFv-Fc Backbone 2 Fab-Fc Side

SEQ ID NO: 74 - protein, 216 aa, Artificial Sequence
  Description of Artificial Sequence: Synthetic polypeptide
  2 + 1 Fab2-scFv-Fc Backbone 2 Fab-scFv-Fc Side
APPVAGPSVFLFPPKPKDTLMISRTPEVTCVVVDVKHEDPEVKFNWYVDGVEVHNAKTKPREEQYNSTYRVVSVLTVLHQDWLNGKEYKCKVSNKALPAPIEKTISKAKGQPREPQVYTLPPSREEMTKNQVKLTCLVKGFYPSDIAVEWESNGQPENNYKTTPPVLDSDGSFFLYSKLTVDKSRWQQGNVFSCSVMHEALHNHYTQKSLSLSPGK

SEQ ID NO: 75 - protein, 329 aa, Artificial Sequence; identical to SEQ ID NO: 51
  Description of Artificial Sequence: Synthetic polypeptide
  2 + 1 Fab2-scFv-Fc Backbone 3 Fab-Fc Side

SEQ ID NO: 76 - protein, 216 aa, Artificial Sequence; identical to SEQ ID NO: 74
  Description of Artificial Sequence: Synthetic polypeptide
  2 + 1 Fab2-scFv-Fc Backbone 3 Fab-scFv-Fc Side

SEQ ID NO: 77 - protein, 329 aa, Artificial Sequence; identical to SEQ ID NO: 53
  Description of Artificial Sequence: Synthetic polypeptide
  2 + 1 Fab2-scFv-Fc Backbone 4 Fab-Fc Side

SEQ ID NO: 78 - protein, 216 aa, Artificial Sequence
  Description of Artificial Sequence: Synthetic polypeptide
  2 + 1 Fab2-scFv-Fc Backbone 4 Fab-scFv-Fc Side
APPVAGPSVFLFPPKPKDTLMISRTPEVTCVVVDVKHEDPEVKFNWYVDGVEVHNAKTKPREEQYNSTYRVVSVLTVLHQDWLNGKEYKCKVSNKALPAPIEKTISKAKGQPREPQVYTLPPSREEMTKNQVSLTCLVKGFYPSDIAVEWESNGQPENNYKTTPPVLDSKGSFFLYSKLTVDKSRWQQGNVFSCSVMHEALHNHYTQKSLSLSPGK

SEQ ID NO: 79 - protein, 329 aa, Artificial Sequence; identical to SEQ ID NO: 55
  Description of Artificial Sequence: Synthetic polypeptide
  2 + 1 Fab2-scFv-Fc Backbone 5 Fab-Fc Side

SEQ ID NO: 80 - protein, 216 aa, Artificial Sequence
  Description of Artificial Sequence: Synthetic polypeptide
  2 + 1 Fab2-scFv-Fc Backbone 5 Fab-scFv-Fc Side
APPVAGPSVFLFPPKPKDTLMISRTPEVTCVVVDVKHEDPEVKFNWYVDGVEVHNAKTKPREEQYNSTYRVVSVLTVLHQDWLNGKEYKCKVSNKALPAPIEKTISKAKGQPREPQVYTLPPSRDQLTKNQVKLTCLVKGFYPSDIAVEWESNGQPENNYKTTPPVLDSDGSFFLYSKLTVDKSRWQQGNVFSCSVMHEALHNHYTQKSLSLSPGK

SEQ ID NO: 81 - protein, 329 aa, Artificial Sequence; identical to SEQ ID NO: 57
  Description of Artificial Sequence: Synthetic polypeptide
  2 + 1 Fab2-scFv-Fc Backbone 6 Fab-Fc Side

SEQ ID NO: 82 - protein, 216 aa, Artificial Sequence
  Description of Artificial Sequence: Synthetic polypeptide
  2 + 1 Fab2-scFv-Fc Backbone 6 Fab-scFv-Fc Side
APPVAGPSVFLFPPKPKDTLMISRTPEVTCVVVDVKHEDPEVKFNWYVDGVEVHNAKTKPREEQYASTYRVVSVLTVLHQDWLNGKEYKCKVSNKALPAPIEKTISKAKGQPREPQVYTLPPSREQMTKNQVKLTCLVKGFYPSDIAVEWESNGQPENNYKTTPPVLDSDGSFFLYSKLTVDKSRWQQGNVFSCSVMHEALHNHYTQKSLSLSPGK

SEQ ID NO: 83 - protein, 329 aa, Artificial Sequence; identical to SEQ ID NO: 59
  Description of Artificial Sequence: Synthetic polypeptide
  2 + 1 Fab2-scFv-Fc Backbone 7 Fab-Fc Side

SEQ ID NO: 84 - protein, 216 aa, Artificial Sequence
  Description of Artificial Sequence: Synthetic polypeptide
  2 + 1 Fab2-scFv-Fc Backbone 7 Fab-scFv-Fc Side
APPVAGPSVFLFPPKPKDTLMISRTPEVTCVVVDVKHEDPEVKFNWYVDGVEVHNAKTKPREEQYSSTYRVVSVLTVLHQDWLNGKEYKCKVSNKALPAPIEKTISKAKGQPREPQVYTLPPSREQMTKNQVKLTCLVKGFYPSDIAVEWESNGQPENNYKTTPPVLDSDGSFFLYSKLTVDKSRWQQGNVFSCSVMHEALHNHYTQKSLSLSPGK

SEQ ID NO: 85 - protein, 329 aa, Artificial Sequence; identical to SEQ ID NO: 67
  Description of Artificial Sequence: Synthetic polypeptide
  2 + 1 Fab2-scFv-Fc Backbone 8 Fab-Fc Side

SEQ ID NO: 86 - protein, 216 aa, Artificial Sequence
  Description of Artificial Sequence: Synthetic polypeptide
  2 + 1 Fab2-scFv-Fc Backbone 8 Fab-scFv-Fc Side
APPVAGPSVFLFPPKPKDTLMISRTPEVTCVVVDVKHEDPEVKFNWYVDGVEVHNAKTKPREEQYNSTYRVVSVLTVLHQDWLNGKEYKCKVSNKALPAPIEKTISKAKGQPREPQVYTLPPSREQMTKNQVKLTCLVKGFYPSDIAVEWESNGQPENNYKTTPPVLDSDGSFFLYSKLTVDKSRWQQGNVFSCSVLHEALHSHYTQKSLSLSPGK

SEQ ID NO: 87 - protein, 329 aa, Artificial Sequence; identical to SEQ ID NO: 69
  Description of Artificial Sequence: Synthetic polypeptide
  2 + 1 Fab2-scFv-Fc Backbone 9 Fab-Fc Side

SEQ ID NO: 88 - protein, 216 aa, Artificial Sequence
  Description of Artificial Sequence: Synthetic polypeptide
  2 + 1 Fab2-scFv-Fc Backbone 9 Fab-scFv-Fc Side
APPVAGPSVFLFPPKPKDTLMISRTPEVTCVVVDVKHEDPEVKFKWYVDGVEVHNAKTKPREEQYNSTYRVVSVLTVLHQDWLNGKEYKCKVSNKALPAPIEKTISKAKGQPREPQVYTLPPSREQMTKNQVKLTCLVKGFYPSDIAVEWESNGQPENNYKTTPPVLDSDGSFFLYSKLTVDKSRWQQGNVFSCSVMHEALHNHYTQKSLSLSPGK

SEQ ID NO: 89 - protein, 107 aa, Artificial Sequence [sequence omitted]

SEQ ID NO: 90 - protein, 106 aa, Artificial Sequence
  Description of Artificial Sequence: Synthetic polypeptide
  Constant Light Domain - Lambda
GQPKAAPSVTLFPPSSEELQANKATLVCLISDFYPGAVTVAWKADSSPVKAGVETTTPSKQSNNKYAASSYLSLTPEQWKSHRSYSCQVTHEGSTVEKTVAPTECS

SEQ ID NO: 91 - protein, 254 aa, Artificial Sequence
  Description of Artificial Sequence: Synthetic polypeptide
  CD3 High - [anti-CD3]_H1.30_L1.47_scFv scFv
EVQLVESGGGLVQPGGSLRLSCAASGFTFSTYAMNWVRQAPGKGLEWVGRIRSKYNNYATYYADSVKGRFTISRDDSKNTLYLQMNSLRAEDTAVYYCVRHGNFGDSYVSWFAYWGQGTLVTVSSGKPGSGKPGSGKPGSGKPGSQAVVTQEPSLTVSPGGTVTLTCGSSTGAVTTSNYANWVQQKPGKSPRGLIGGTNKRAPGVPARFSGSLLGGKAALTISGAQPEDEADYYCALWYSNHWVFGGGTKLTVL

SEQ ID NO: 92 - protein, 125 aa, Artificial Sequence
  Description of Artificial Sequence: Synthetic polypeptide
  CD3 High - [anti-CD3]_H1.30_L1.47_scFv Variable Heavy (vh) Domain
EVQLVESGGGLVQPGGSLRLSCAASGFTFSTYAMNWVRQAPGKGLEWVGRIRSKYNNYATYYADSVKGRFTISRDDSKNTLYLQMNSLRAEDTAVYYCVRHGNFGDSYVSWFAYWGQGTLVTVSS

SEQ ID NO: 93 - protein, 5 aa, Artificial Sequence
  Description of Artificial Sequence: Synthetic peptide
  CD3 High - [anti-CD3]_H1.30_L1.47_scFv vhCDR1
TYAMN

SEQ ID NO: 94 - protein, 19 aa, Artificial Sequence
  Description of Artificial Sequence: Synthetic peptide
  CD3 High - [anti-CD3]_H1.30_L1.47_scFv vhCDR2
RIRSKYNNYATYYADSVKG

SEQ ID NO: 95 - protein, 14 aa, Artificial Sequence
  Description of Artificial Sequence: Synthetic peptide
  CD3 High - [anti-CD3]_H1.30_L1.47_scFv vhCDR3
HGNFGDSYVSWFAY

SEQ ID NO: 96 - protein, 109 aa, Artificial Sequence
  Description of Artificial Sequence: Synthetic polypeptide
  CD3 High - [anti-CD3]_H1.30_L1.47_scFv Variable Light (vl) Domain
QAVVTQEPSLTVSPGGTVTLTCGSSTGAVTTSNYANWVQQKPGKSPRGLIGGTNKRAPGVPARFSGSLLGGKAALTISGAQPEDEADYYCALWYSNHWVFGGGTKLTVL

SEQ ID NO: 97 - protein, 14 aa, Artificial Sequence
  Description of Artificial Sequence: Synthetic peptide
  CD3 High - [anti-CD3]_H1.30_L1.47_scFv vlCDR1
GSSTGAVTTSNYAN

SEQ ID NO: 98 - protein, 7 aa, Artificial Sequence
  Description of Artificial Sequence: Synthetic peptide
  CD3 High - [anti-CD3]_H1.30_L1.47_scFv vlCDR2
GTNKRAP

SEQ ID NO: 99 - protein, 9 aa, Artificial Sequence
  Description of Artificial Sequence: Synthetic peptide
  CD3 High - [anti-CD3]_H1.30_L1.47_scFv vlCDR3
ALWYSNHWV

SEQ ID NO: 100 - protein, 20 aa, Artificial Sequence
  Description of Artificial Sequence: Synthetic peptide
  CD3 High - [anti-CD3]_H1.30_L1.47_scFv Linker
GKPGSGKPGSGKPGSGKPGS

SEQ ID NO: 101 - protein, 254 aa, Artificial Sequence
  Description of Artificial Sequence: Synthetic polypeptide
  CD3 High-Int #1 - [anti-CD3]_H1.32_L1.47_scFv scFv
EVQLVESGGGLVQPGGSLRLSCAASGFTFSTYAMNWVRQAPGKGLEWVGRIRSKANNYATYYADSVKGRFTISRDDSKNTLYLQMNSLRAEDTAVYYCVRHGNFGDSYVSWFAYWGQGTLVTVSSGKPGSGKPGSGKPGSGKPGSQAVVTQEPSLTVSPGGTVTLTCGSSTGAVTTSNYANWVQQKPGKSPRGLIGGTNKRAPGVPARFSGSLLGGKAALTISGAQPEDEADYYCALWYSNHWVFGGGTKLTVL

SEQ ID NO: 102 - protein, 125 aa, Artificial Sequence
  Description of Artificial Sequence: Synthetic polypeptide
  CD3 High-Int #1 - [anti-CD3]_H1.32_L1.47_scFv Variable Heav y (vh) Domain
EVQLVESGGGLVQPGGSLRLSCAASGFTFSTYAMNWVRQAPGKGLEWVGRIRSKANNYATYYADSVKGRFTISRDDSKNTLYLQMNSLRAEDTAVYYCVRHGNFGDSYVSWFAYWGQGTLVTVSS

SEQ ID NO: 103 - protein, 5 aa, Artificial Sequence
  Description of Artificial Sequence: Synthetic peptide
  CD3 High-Int #1 - [anti-CD3]_H1.32_L1.47_scFv vhCDR1
TYAMN

SEQ ID NO: 104 - protein, 19 aa, Artificial Sequence
  Description of Artificial Sequence: Synthetic peptide
  CD3 High-Int #1 - [anti-CD3]_H1.32_L1.47_scFv vhCDR2
RIRSKANNYATYYADSVKG

SEQ ID NO: 105 - protein, 14 aa, Artificial Sequence
  Description of Artificial Sequence: Synthetic peptide
  CD3 High-Int #1 - [anti-CD3]_H1.32_L1.47_scFv vhCDR3
HGNFGDSYVSWFAY

SEQ ID NO: 106 - protein, 109 aa, Artificial Sequence; identical to SEQ ID NO: 96
  Description of Artificial Sequence: Synthetic polypeptide
  CD3 High-Int #1 - [anti-CD3]_H1.32_L1.47_scFv Variable Ligh t (vl) Domain

SEQ ID NO: 107 - protein, 14 aa, Artificial Sequence
  Description of Artificial Sequence: Synthetic peptide
  CD3 High-Int #1 - [anti-CD3]_H1.32_L1.47_scFv vlCDR1
GSSTGAVTTSNYAN

SEQ ID NO: 108 - protein, 7 aa, Artificial Sequence
  Description of Artificial Sequence: Synthetic peptide
  CD3 High-Int #1 - [anti-CD3]_H1.32_L1.47_scFv vlCDR2
GTNKRAP

SEQ ID NO: 109 - protein, 9 aa, Artificial Sequence
  Description of Artificial Sequence: Synthetic peptide
  CD3 High-Int #1 - [anti-CD3]_H1.32_L1.47_scFv vlCDR3
ALWYSNHWV

SEQ ID NO: 110 - protein, 20 aa, Artificial Sequence
  Description of Artificial Sequence: Synthetic peptide
  CD3 High-Int #1 - [anti-CD3]_H1.32_L1.47_scFv Linker
GKPGSGKPGSGKPGSGKPGS

SEQ ID NO: 111 - protein, 254 aa, Artificial Sequence
  Description of Artificial Sequence: Synthetic polypeptide
  CD3 High-Int #2 - [anti-CD3]_H1.89_L1.47_scFv scFv
EVQLVESGGGLVQPGGSLRLSCAASGFTFSTYAMNWVRQAPGKGLEWVGRIRSKYNNYATYYADSVKGRFTISRDDSKNTLYLQMNSLRAEDTAVYYCVRHGNFGDEYVSWFAYWGQGTLVTVSSGKPGSGKPGSGKPGSGKPGSQAVVTQEPSLTVSPGGTVTLTCGSSTGAVTTSNYANWVQQKPGKSPRGLIGGTNKRAPGVPARFSGSLLGGKAALTISGAQPEDEADYYCALWYSNHWVFGGGTKLTVL

SEQ ID NO: 112 - protein, 125 aa, Artificial Sequence
  Description of Artificial Sequence: Synthetic polypeptide
  CD3 High-Int #2 - [anti-CD3]_H1.89_L1.47_scFv Variable Heav y (vh) Domain
EVQLVESGGGLVQPGGSLRLSCAASGFTFSTYAMNWVRQAPGKGLEWVGRIRSKYNNYATYYADSVKGRFTISRDDSKNTLYLQMNSLRAEDTAVYYCVRHGNFGDEYVSWFAYWGQGTLVTVSS

SEQ ID NO: 113 - protein, 5 aa, Artificial Sequence
  Description of Artificial Sequence: Synthetic peptide
  CD3 High-Int #2 - [anti-CD3]_H1.89_L1.47_scFv vhCDR1
TYAMN

SEQ ID NO: 114 - protein, 19 aa, Artificial Sequence
  Description of Artificial Sequence: Synthetic peptide
  CD3 High-Int #2 - [anti-CD3]_H1.89_L1.47_scFv vhCDR2
RIRSKYNNYATYYADSVKG

SEQ ID NO: 115 - protein, 14 aa, Artificial Sequence
  Description of Artificial Sequence: Synthetic peptide
  CD3 High-Int #2 - [anti-CD3]_H1.89_L1.47_scFv vhCDR3
HGNFGDEYVSWFAY

SEQ ID NO: 116 - protein, 109 aa, Artificial Sequence; identical to SEQ ID NO: 96
  Description of Artificial Sequence: Synthetic polypeptide
  CD3 High-Int #2 - [anti-CD3]_H1.89_L1.47_scFv Variable Ligh t (vl) Domain

SEQ ID NO: 117 - protein, 14 aa, Artificial Sequence
  Description of Artificial Sequence: Synthetic peptide
  CD3 High-Int #2 - [anti-CD3]_H1.89_L1.47_scFv vlCDR1
GSSTGAVTTSNYAN

SEQ ID NO: 118 - protein, 7 aa, Artificial Sequence
  Description of Artificial Sequence: Synthetic peptide
  CD3 High-Int #2 - [anti-CD3]_H1.89_L1.47_scFv vlCDR2
GTNKRAP

SEQ ID NO: 119 - protein, 9 aa, Artificial Sequence
  Description of Artificial Sequence: Synthetic peptide
  CD3 High-Int #2 - [anti-CD3]_H1.89_L1.47_scFv vlCDR3
ALWYSNHWV

SEQ ID NO: 120 - protein, 20 aa, Artificial Sequence
  Description of Artificial Sequence: Synthetic peptide
  CD3 High-Int #2 - [anti-CD3]_H1.89_L1.47_scFv Linker
GKPGSGKPGSGKPGSGKPGS

SEQ ID NO: 121 - protein, 254 aa, Artificial Sequence
  Description of Artificial Sequence: Synthetic polypeptide
  CD3 High-Int - [anti-CD3]_H1.90_L1.47_scFv scFv
EVQLVESGGGLVQPGGSLRLSCAASGFTFSTYAMNWVRQAPGKGLEWVGRIRSKYNNYATYYADSVKGRFTISRDDSKNTLYLQMNSLRAEDTAVYYCVRHGNFGDPYVSWFAYWGQGTLVTVSSGKPGSGKPGSGKPGSGKPGSQAVVTQEPSLTVSPGGTVTLTCGSSTGAVTTSNYANWVQQKPGKSPRGLIGGTNKRAPGVPARFSGSLLGGKAALTISGAQPEDEADYYCALWYSNHWVFGGGTKLTVL

SEQ ID NO: 122 - protein, 125 aa, Artificial Sequence
  Description of Artificial Sequence: Synthetic polypeptide
  CD3 High-Int - [anti-CD3]_H1.90_L1.47_scFv Variable Heavy ( vh) Domain
EVQLVESGGGLVQPGGSLRLSCAASGFTFSTYAMNWVRQAPGKGLEWVGRIRSKYNNYATYYADSVKGRFTISRDDSKNTLYLQMNSLRAEDTAVYYCVRHGNFGDPYVSWFAYWGQGTLVTVSS

SEQ ID NO: 123 - protein, 5 aa, Artificial Sequence
  Description of Artificial Sequence: Synthetic peptide
  CD3 High-Int - [anti-CD3]_H1.90_L1.47_scFv vhCDR1
TYAMN

SEQ ID NO: 124 - protein, 19 aa, Artificial Sequence
  Description of Artificial Sequence: Synthetic peptide
  CD3 High-Int - [anti-CD3]_H1.90_L1.47_scFv vhCDR2
RIRSKYNNYATYYADSVKG

SEQ ID NO: 125 - protein, 14 aa, Artificial Sequence
  Description of Artificial Sequence: Synthetic peptide
  CD3 High-Int - [anti-CD3]_H1.90_L1.47_scFv vhCDR3
HGNFGDPYVSWFAY

SEQ ID NO: 126 - protein, 109 aa, Artificial Sequence; identical to SEQ ID NO: 96
  Description of Artificial Sequence: Synthetic polypeptide
  CD3 High-Int - [anti-CD3]_H1.90_L1.47_scFv Variable Light ( vl) Domain

SEQ ID NO: 127 - protein, 14 aa, Artificial Sequence
  Description of Artificial Sequence: Synthetic peptide
  CD3 High-Int - [anti-CD3]_H1.90_L1.47_scFv vlCDR1
GSSTGAVTTSNYAN

SEQ ID NO: 128 - protein, 7 aa, Artificial Sequence
  Description of Artificial Sequence: Synthetic peptide
  CD3 High-Int - [anti-CD3]_H1.90_L1.47_scFv vlCDR2
GTNKRAP

SEQ ID NO: 129 - protein, 9 aa, Artificial Sequence
  Description of Artificial Sequence: Synthetic peptide
  CD3 High-Int - [anti-CD3]_H1.90_L1.47_scFv vlCDR3
ALWYSNHWV

SEQ ID NO: 130 - protein, 20 aa, Artificial Sequence
  Description of Artificial Sequence: Synthetic peptide
  CD3 High-Int - [anti-CD3]_H1.90_L1.47_scFv Linker
GKPGSGKPGSGKPGSGKPGS

SEQ ID NO: 131 - protein, 254 aa, Artificial Sequence
  Description of Artificial Sequence: Synthetic polypeptide
  Anti-CD3-Intermediate - [anti-CD3]_H1.33_L1.47_scFv scFv
EVQLVESGGGLVQPGGSLRLSCAASGFTFSTYAMNWVRQAPGKGLEWVGRIRSKYNNYATYYADSVKGRFTISRDDSKNTLYLQMNSLRAEDTAVYYCVRHGNFGDSYVSWFDYWGQGTLVTVSSGKPGSGKPGSGKPGSGKPGSQAVVTQEPSLTVSPGGTVTLTCGSSTGAVTTSNYANWVQQKPGKSPRGLIGGTNKRAPGVPARFSGSLLGGKAALTISGAQPEDEADYYCALWYSNHWVFGGGTKLTVL

SEQ ID NO: 132 - protein, 125 aa, Artificial Sequence
  Description of Artificial Sequence: Synthetic polypeptide
  Anti-CD3-Intermediate - [anti-CD3]_H1.33_L1.47_scFv Variabl e Heavy (vh) Domain
EVQLVESGGGLVQPGGSLRLSCAASGFTFSTYAMNWVRQAPGKGLEWVGRIRSKYNNYATYYADSVKGRFTISRDDSKNTLYLQMNSLRAEDTAVYYCVRHGNFGDSYVSWFDYWGQGTLVTVSS

SEQ ID NO: 133 - protein, 5 aa, Artificial Sequence
  Description of Artificial Sequence: Synthetic peptide
  Anti-CD3-Intermediate - [anti-CD3]_H1.33_L1.47_scFv vhCDR1
TYAMN

SEQ ID NO: 134 - protein, 19 aa, Artificial Sequence
  Description of Artificial Sequence: Synthetic peptide
  Anti-CD3-Intermediate - [anti-CD3]_H1.33_L1.47_scFv vhCDR2
RIRSKYNNYATYYADSVKG

SEQ ID NO: 135 - protein, 14 aa, Artificial Sequence
  Description of Artificial Sequence: Synthetic peptide
  Anti-CD3-Intermediate - [anti-CD3]_H1.33_L1.47_scFv vhCDR3
HGNFGDSYVSWFDY

SEQ ID NO: 136 - protein, 109 aa, Artificial Sequence; identical to SEQ ID NO: 96
  Description of Artificial Sequence: Synthetic polypeptide
  Anti-CD3-Intermediate - [anti-CD3]_H1.33_L1.47_scFv Variabl e Light (vl) Domain

SEQ ID NO: 137 - protein, 14 aa, Artificial Sequence
  Description of Artificial Sequence: Synthetic peptide
  Anti-CD3-Intermediate - [anti-CD3]_H1.33_L1.47_scFv vlCDR1
GSSTGAVTTSNYAN

SEQ ID NO: 138 - protein, 7 aa, Artificial Sequence
  Description of Artificial Sequence: Synthetic peptide
  Anti-CD3-Intermediate - [anti-CD3]_H1.33_L1.47_scFv vlCDR2
GTNKRAP

SEQ ID NO: 139 - protein, 9 aa, Artificial Sequence
  Description of Artificial Sequence: Synthetic peptide
  Anti-CD3-Intermediate - [anti-CD3]_H1.33_L1.47_scFv vlCDR3
ALWYSNHWV

SEQ ID NO: 140 - protein, 20 aa, Artificial Sequence
  Description of Artificial Sequence: Synthetic peptide
  Anti-CD3-Intermediate - [anti-CD3]_H1.33_L1.47_scFv Linker
GKPGSGKPGSGKPGSGKPGS

SEQ ID NO: 141 - protein, 254 aa, Artificial Sequence
  Description of Artificial Sequence: Synthetic polypeptide
  CD3 High-Int - [anti-CD3]_H1.31_L1.47_scFv scFv
EVQLVESGGGLVQPGGSLRLSCAASGFTFSTYAMSWVRQAPGKGLEWVGRIRSKYNNYATYYADSVKGRFTISRDDSKNTLYLQMNSLRAEDTAVYYCVRHGNFGDSYVSWFAYWGQGTLVTVSSGKPGSGKPGSGKPGSGKPGSQAVVTQEPSLTVSPGGTVTLTCGSSTGAVTTSNYANWVQQKPGKSPRGLIGGTNKRAPGVPARFSGSLLGGKAALTISGAQPEDEADYYCALWYSNHWVFGGGTKLTVL

SEQ ID NO: 142 - protein, 125 aa, Artificial Sequence
  Description of Artificial Sequence: Synthetic polypeptide
  CD3 High-Int - [anti-CD3]_H1.31_L1.47_scFv Variable Heavy ( vh) Domain
EVQLVESGGGLVQPGGSLRLSCAASGFTFSTYAMSWVRQAPGKGLEWVGRIRSKYNNYATYYADSVKGRFTISRDDSKNTLYLQMNSLRAEDTAVYYCVRHGNFGDSYVSWFAYWGQGTLVTVSS

SEQ ID NO: 143 - protein, 5 aa, Artificial Sequence
  Description of Artificial Sequence: Synthetic peptide
  CD3 High-Int - [anti-CD3]_H1.31_L1.47_scFv vhCDR1
TYAMS

SEQ ID NO: 144 - protein, 19 aa, Artificial Sequence
  Description of Artificial Sequence: Synthetic peptide
  CD3 High-Int - [anti-CD3]_H1.31_L1.47_scFv vhCDR2
RIRSKYNNYATYYADSVKG

SEQ ID NO: 145 - protein, 14 aa, Artificial Sequence
  Description of Artificial Sequence: Synthetic peptide
  CD3 High-Int - [anti-CD3]_H1.31_L1.47_scFv vhCDR3
HGNFGDSYVSWFAY

SEQ ID NO: 146 - protein, 109 aa, Artificial Sequence; identical to SEQ ID NO: 96
  Description of Artificial Sequence: Synthetic polypeptide
  CD3 High-Int - [anti-CD3]_H1.31_L1.47_scFv Variable Light ( vl) Domain

SEQ ID NO: 147 - protein, 14 aa, Artificial Sequence
  Description of Artificial Sequence: Synthetic peptide
  CD3 High-Int - [anti-CD3]_H1.31_L1.47_scFv vlCDR1
GSSTGAVTTSNYAN

SEQ ID NO: 148 - protein, 7 aa, Artificial Sequence
  Description of Artificial Sequence: Synthetic peptide
  CD3 High-Int - [anti-CD3]_H1.31_L1.47_scFv vlCDR2
GTNKRAP

SEQ ID NO: 149 - protein, 9 aa, Artificial Sequence
  Description of Artificial Sequence: Synthetic peptide
  CD3 High-Int - [anti-CD3]_H1.31_L1.47_scFv vlCDR3
ALWYSNHWV

SEQ ID NO: 150 - protein, 20 aa, Artificial Sequence
  Description of Artificial Sequence: Synthetic peptide
  CD3 High-Int - [anti-CD3]_H1.31_L1.47_scFv Linker
GKPGSGKPGSGKPGSGKPGS

SEQ ID NO: 151 - protein, 254 aa, Artificial Sequence
  Description of Artificial Sequence: Synthetic polypeptide
  CD3 High[VL-VH] - [anti-CD3]_L1.47_ H1.30_scFv scFv
QAVVTQEPSLTVSPGGTVTLTCGSSTGAVTTSNYANWVQQKPGKSPRGLIGGTNKRAPGVPARFSGSLLGGKAALTISGAQPEDEADYYCALWYSNHWVFGGGTKLTVLGKPGSGKPGSGKPGSGKPGSEVQLVESGGGLVQPGGSLRLSCAASGFTFSTYAMNWVRQAPGKGLEWVGRIRSKYNNYATYYADSVKGRFTISRDDSKNTLYLQMNSLRAEDTAVYYCVRHGNFGDSYVSWFAYWGQGTLVTVSS

SEQ ID NO: 152 - protein, 109 aa, Artificial Sequence; identical to SEQ ID NO: 96
  Description of Artificial Sequence: Synthetic polypeptide
  CD3 High[VL-VH] - [anti-CD3]_L1.47_ H1.30_scFv Variable Lig ht (vl) Domain

SEQ ID NO: 153 - protein, 14 aa, Artificial Sequence
  Description of Artificial Sequence: Synthetic peptide
  CD3 High[VL-VH] - [anti-CD3]_L1.47_ H1.30_scFv vlCDR1
GSSTGAVTTSNYAN

SEQ ID NO: 154 - protein, 7 aa, Artificial Sequence
  Description of Artificial Sequence: Synthetic peptide
  CD3 High[VL-VH] - [anti-CD3]_L1.47_ H1.30_scFv vlCDR2
GTNKRAP

SEQ ID NO: 155 - protein, 9 aa, Artificial Sequence
  Description of Artificial Sequence: Synthetic peptide
  CD3 High[VL-VH] - [anti-CD3]_L1.47_ H1.30_scFv vlCDR3
ALWYSNHWV

SEQ ID NO: 156 - protein, 125 aa, Artificial Sequence; identical to SEQ ID NO: 92
  Description of Artificial Sequence: Synthetic polypeptide
  CD3 High[VL-VH] - [anti-CD3]_L1.47_ H1.30_scFv Variable Hea vy (vh) Domain

SEQ ID NO: 157 - protein, 5 aa, Artificial Sequence
  Description of Artificial Sequence: Synthetic peptide
  CD3 High[VL-VH] - [anti-CD3]_L1.47_ H1.30_scFv vhCDR1
TYAMN

SEQ ID NO: 158 - protein, 19 aa, Artificial Sequence
  Description of Artificial Sequence: Synthetic peptide
  CD3 High[VL-VH] - [anti-CD3]_L1.47_ H1.30_scFv vhCDR2
RIRSKYNNYATYYADSVKG

SEQ ID NO: 159 - protein, 14 aa, Artificial Sequence
  Description of Artificial Sequence: Synthetic peptide
  CD3 High[VL-VH] - [anti-CD3]_L1.47_ H1.30_scFv vhCDR3
HGNFGDSYVSWFAY

SEQ ID NO: 160 - protein, 20 aa, Artificial Sequence
  Description of Artificial Sequence: Synthetic peptide
  CD3 High[VL-VH] - [anti-CD3]_L1.47_ H1.30_scFv Linker
GKPGSGKPGSGKPGSGKPGS

SEQ ID NO: 161 - protein, 254 aa, Artificial Sequence
  Description of Artificial Sequence: Synthetic polypeptide
  CD3 High-Int #1[VL-VH] - [anti-CD3]_L1.47_ H1.32_scFv scFv
QAVVTQEPSLTVSPGGTVTLTCGSSTGAVTTSNYANWVQQKPGKSPRGLIGGTNKRAPGVPARFSGSLLGGKAALTISGAQPEDEADYYCALWYSNHWVFGGGTKLTVLGKPGSGKPGSGKPGSGKPGSEVQLVESGGGLVQPGGSLRLSCAASGFTFSTYAMNWVRQAPGKGLEWVGRIRSKANNYATYYADSVKGRFTISRDDSKNTLYLQMNSLRAEDTAVYYCVRHGNFGDSYVSWFAYWGQGTLVTVSS

SEQ ID NO: 162 - protein, 109 aa, Artificial Sequence; identical to SEQ ID NO: 96
  Description of Artificial Sequence: Synthetic polypeptide
  CD3 High-Int #1[VL-VH] - [anti-CD3]_L1.47_ H1.32_scFv Varia ble Light (vl) Domain

SEQ ID NO: 163 - protein, 14 aa, Artificial Sequence
  Description of Artificial Sequence: Synthetic peptide
  CD3 High-Int #1[VL-VH] - [anti-CD3]_L1.47_ H1.32_scFv vlCDR 1
GSSTGAVTTSNYAN

SEQ ID NO: 164 - protein, 7 aa, Artificial Sequence
  Description of Artificial Sequence: Synthetic peptide
  CD3 High-Int #1[VL-VH] - [anti-CD3]_L1.47_ H1.32_scFv vlCDR 2
GTNKRAP

SEQ ID NO: 165 - protein, 9 aa, Artificial Sequence
  Description of Artificial Sequence: Synthetic peptide
  CD3 High-Int #1[VL-VH] - [anti-CD3]_L1.47_ H1.32_scFv vlCDR 3
ALWYSNHWV

SEQ ID NO: 166 - protein, 125 aa, Artificial Sequence; identical to SEQ ID NO: 102
  Description of Artificial Sequence: Synthetic polypeptide
  CD3 High-Int #1[VL-VH] - [anti-CD3]_L1.47_ H1.32_scFv Varia ble Heavy (vh) Domain

SEQ ID NO: 167 - protein, 5 aa, Artificial Sequence
  Description of Artificial Sequence: Synthetic peptide
  CD3 High-Int #1[VL-VH] - [anti-CD3]_L1.47_ H1.32_scFv vhCDR 1
TYAMN

SEQ ID NO: 168 - protein, 19 aa, Artificial Sequence
  Description of Artificial Sequence: Synthetic peptide
  CD3 High-Int #1[VL-VH] - [anti-CD3]_L1.47_ H1.32_scFv vhCDR 2
RIRSKANNYATYYADSVKG

SEQ ID NO: 169 - protein, 14 aa, Artificial Sequence
  Description of Artificial Sequence: Synthetic peptide
  CD3 High-Int #1[VL-VH] - [anti-CD3]_L1.47_ H1.32_scFv vhCDR 3
HGNFGDSYVSWFAY

SEQ ID NO: 170 - protein, 20 aa, Artificial Sequence
  Description of Artificial Sequence: Synthetic peptide
  CD3 High-Int #1[VL-VH] - [anti-CD3]_L1.47_ H1.32_scFv Linke r
GKPGSGKPGSGKPGSGKPGS

SEQ ID NO: 171 - protein, 254 aa, Artificial Sequence
  Description of Artificial Sequence: Synthetic polypeptide
  CD3 High-Int #2[VL-VH] - [anti-CD3]_L1.47_ H1.89_scFv scFv
QAVVTQEPSLTVSPGGTVTLTCGSSTGAVTTSNYANWVQQKPGKSPRGLIGGTNKRAPGVPARFSGSLLGGKAALTISGAQPEDEADYYCALWYSNHWVFGGGTKLTVLGKPGSGKPGSGKPGSGKPGSEVQLVESGGGLVQPGGSLRLSCAASGFTFSTYAMNWVRQAPGKGLEWVGRIRSKYNNYATYYADSVKGRFTISRDDSKNTLYLQMNSLRAEDTAVYYCVRHGNFGDEYVSWFAYWGQGTLVTVSS

SEQ ID NO: 172 - protein, 109 aa, Artificial Sequence; identical to SEQ ID NO: 96
  Description of Artificial Sequence: Synthetic polypeptide
  CD3 High-Int #2[VL-VH] - [anti-CD3]_L1.47_ H1.89_scFv Varia ble Light (vl) Domain

SEQ ID NO: 173 - protein, 14 aa, Artificial Sequence
  Description of Artificial Sequence: Synthetic peptide
  CD3 High-Int #2[VL-VH] - [anti-CD3]_L1.47_ H1.89_scFv vlCDR 1
GSSTGAVTTSNYAN

SEQ ID NO: 174 - protein, 7 aa, Artificial Sequence
  Description of Artificial Sequence: Synthetic peptide
  CD3 High-Int #2[VL-VH] - [anti-CD3]_L1.47_ H1.89_scFv vlCDR 2
GTNKRAP

SEQ ID NO: 175 - protein, 9 aa, Artificial Sequence
  Description of Artificial Sequence: Synthetic peptide
  CD3 High-Int #2[VL-VH] - [anti-CD3]_L1.47_ H1.89_scFv vlCDR 3
ALWYSNHWV

SEQ ID NO: 176 - protein, 125 aa, Artificial Sequence; identical to SEQ ID NO: 112
  Description of Artificial Sequence: Synthetic polypeptide
  CD3 High-Int #2[VL-VH] - [anti-CD3]_L1.47_ H1.89_scFv Varia ble Heavy (vh) Domain

SEQ ID NO: 177 - protein, 5 aa, Artificial Sequence
  Description of Artificial Sequence: Synthetic peptide
  CD3 High-Int #2[VL-VH] - [anti-CD3]_L1.47_ H1.89_scFv vhCDR 1
TYAMN

SEQ ID NO: 178 - protein, 19 aa, Artificial Sequence
  Description of Artificial Sequence: Synthetic peptide
  CD3 High-Int #2[VL-VH] - [anti-CD3]_L1.47_ H1.89_scFv vhCDR 2
RIRSKYNNYATYYADSVKG

SEQ ID NO: 179 - protein, 14 aa, Artificial Sequence
  Description of Artificial Sequence: Synthetic peptide
  CD3 High-Int #2[VL-VH] - [anti-CD3]_L1.47_ H1.89_scFv vhCDR 3
HGNFGDEYVSWFAY

SEQ ID NO: 180 - protein, 20 aa, Artificial Sequence
  Description of Artificial Sequence: Synthetic peptide
  CD3 High-Int #2[VL-VH] - [anti-CD3]_L1.47_ H1.89_scFv Linke r
GKPGSGKPGSGKPGSGKPGS

SEQ ID NO: 181 - protein, 254 aa, Artificial Sequence
  Description of Artificial Sequence: Synthetic polypeptide
  CD3 High-Int[VL-VH] - [anti-CD3]_L1.47_ H1.90_scFv scFv
QAVVTQEPSLTVSPGGTVTLTCGSSTGAVTTSNYANWVQQKPGKSPRGLIGGTNKRAPGVPARFSGSLLGGKAALTISGAQPEDEADYYCALWYSNHWVFGGGTKLTVLGKPGSGKPGSGKPGSGKPGSEVQLVESGGGLVQPGGSLRLSCAASGFTFSTYAMNWVRQAPGKGLEWVGRIRSKYNNYATYYADSVKGRFTISRDDSKNTLYLQMNSLRAEDTAVYYCVRHGNFGDPYVSWFAYWGQGTLVTVSS

SEQ ID NO: 182 - protein, 109 aa, Artificial Sequence; identical to SEQ ID NO: 96
  Description of Artificial Sequence: Synthetic polypeptide
  CD3 High-Int[VL-VH] - [anti-CD3]_L1.47_ H1.90_scFv Variable Light (vl) Domain

SEQ ID NO: 183 - protein, 14 aa, Artificial Sequence
  Description of Artificial Sequence: Synthetic peptide
  CD3 High-Int[VL-VH] - [anti-CD3]_L1.47_ H1.90_scFv vlCDR1
GSSTGAVTTSNYAN

SEQ ID NO: 184 - protein, 7 aa, Artificial Sequence
  Description of Artificial Sequence: Synthetic peptide
  CD3 High-Int[VL-VH] - [anti-CD3]_L1.47_ H1.90_scFv vlCDR2
GTNKRAP

SEQ ID NO: 185 - protein, 9 aa, Artificial Sequence
  Description of Artificial Sequence: Synthetic peptide
  CD3 High-Int[VL-VH] - [anti-CD3]_L1.47_ H1.90_scFv vlCDR3
ALWYSNHWV

SEQ ID NO: 186 - protein, 125 aa, Artificial Sequence; identical to SEQ ID NO: 122
  Description of Artificial Sequence: Synthetic polypeptide
  CD3 High-Int[VL-VH] - [anti-CD3]_L1.47_ H1.90_scFv Variable Heavy (vh) Domain

SEQ ID NO: 187 - protein, 5 aa, Artificial Sequence
  Description of Artificial Sequence: Synthetic peptide
  CD3 High-Int[VL-VH] - [anti-CD3]_L1.47_ H1.90_scFv vhCDR1
TYAMN

SEQ ID NO: 188 - protein, 19 aa, Artificial Sequence
  Description of Artificial Sequence: Synthetic peptide
  CD3 High-Int[VL-VH] - [anti-CD3]_L1.47_ H1.90_scFv vhCDR2
RIRSKYNNYATYYADSVKG

SEQ ID NO: 189 - protein, 14 aa, Artificial Sequence
  Description of Artificial Sequence: Synthetic peptide
  CD3 High-Int[VL-VH] - [anti-CD3]_L1.47_ H1.90_scFv vhCDR3
HGNFGDPYVSWFAY

SEQ ID NO: 190 - protein, 20 aa, Artificial Sequence
  Description of Artificial Sequence: Synthetic peptide
  CD3 High-Int[VL-VH] - [anti-CD3]_L1.47_ H1.90_scFv Linker
GKPGSGKPGSGKPGSGKPGS

SEQ ID NO: 191 - protein, 254 aa, Artificial Sequence
  Description of Artificial Sequence: Synthetic polypeptide
  Anti-CD3-Intermediate[VL-VH] - [anti-CD3]_L1.47_ H1.33_scFv scFv
QAVVTQEPSLTVSPGGTVTLTCGSSTGAVTTSNYANWVQQKPGKSPRGLIGGTNKRAPGVPARFSGSLLGGKAALTISGAQPEDEADYYCALWYSNHWVFGGGTKLTVLGKPGSGKPGSGKPGSGKPGSEVQLVESGGGLVQPGGSLRLSCAASGFTFSTYAMNWVRQAPGKGLEWVGRIRSKYNNYATYYADSVKGRFTISRDDSKNTLYLQMNSLRAEDTAVYYCVRHGNFGDSYVSWFDYWGQGTLVTVSS

SEQ ID NO: 192 - protein, 109 aa, Artificial Sequence; identical to SEQ ID NO: 96
  Description of Artificial Sequence: Synthetic polypeptide
  Anti-CD3-Intermediate[VL-VH] - [anti-CD3]_L1.47_ H1.33_scFv Variable Light (vl) Domain

SEQ ID NO: 193 - protein, 14 aa, Artificial Sequence
  Description of Artificial Sequence: Synthetic peptide
  Anti-CD3-Intermediate[VL-VH] - [anti-CD3]_L1.47_ H1.33_scFv vlCDR1
GSSTGAVTTSNYAN

SEQ ID NO: 194 - protein, 7 aa, Artificial Sequence
  Description of Artificial Sequence: Synthetic peptide
  Anti-CD3-Intermediate[VL-VH] - [anti-CD3]_L1.47_ H1.33_scFv vlCDR2
GTNKRAP

SEQ ID NO: 195 - protein, 9 aa, Artificial Sequence
  Description of Artificial Sequence: Synthetic peptide
  Anti-CD3-Intermediate[VL-VH] - [anti-CD3]_L1.47_ H1.33_scFv vlCDR3
ALWYSNHWV

SEQ ID NO: 196 - protein, 125 aa, Artificial Sequence; identical to SEQ ID NO: 132
  Description of Artificial Sequence: Synthetic polypeptide
  Anti-CD3-Intermediate[VL-VH] - [anti-CD3]_L1.47_ H1.33_scFv Variable Heavy (vh) Domain

SEQ ID NO: 197 - protein, 5 aa, Artificial Sequence
  Description of Artificial Sequence: Synthetic peptide
  Anti-CD3-Intermediate[VL-VH] - [anti-CD3]_L1.47_ H1.33_scFv vhCDR1
TYAMN

SEQ ID NO: 198 - protein, 19 aa, Artificial Sequence
  Description of Artificial Sequence: Synthetic peptide
  Anti-CD3-Intermediate[VL-VH] - [anti-CD3]_L1.47_ H1.33_scFv vhCDR2
RIRSKYNNYATYYADSVKG

SEQ ID NO: 199 - protein, 14 aa, Artificial Sequence
  Description of Artificial Sequence: Synthetic peptide
  Anti-CD3-Intermediate[VL-VH] - [anti-CD3]_L1.47_ H1.33_scFv vhCDR3
HGNFGDSYVSWFDY

SEQ ID NO: 200 - protein, 20 aa, Artificial Sequence
  Description of Artificial Sequence: Synthetic peptide
  Anti-CD3-Intermediate[VL-VH] - [anti-CD3]_L1.47_ H1.33_scFv Linker
GKPGSGKPGSGKPGSGKPGS

SEQ ID NO: 201 - protein, 254 aa, Artificial Sequence
  Description of Artificial Sequence: Synthetic polypeptide
  CD3 High-Int[VL-VH] - [anti-CD3]_L1.47_ H1.31_scFv scFv
QAVVTQEPSLTVSPGGTVTLTCGSSTGAVTTSNYANWVQQKPGKSPRGLIGGTNKRAPGVPARFSGSLLGGKAALTISGAQPEDEADYYCALWYSNHWVFGGGTKLTVLGKPGSGKPGSGKPGSGKPGSEVQLVESGGGLVQPGGSLRLSCAASGFTFSTYAMSWVRQAPGKGLEWVGRIRSKYNNYATYYADSVKGRFTISRDDSKNTLYLQMNSLRAEDTAVYYCVRHGNFGDSYVSWFAYWGQGTLVTVSS

SEQ ID NO: 202 - protein, 109 aa, Artificial Sequence; identical to SEQ ID NO: 96
  Description of Artificial Sequence: Synthetic polypeptide
  CD3 High-Int[VL-VH] - [anti-CD3]_L1.47_ H1.31_scFv Variable Light (vl) Domain

SEQ ID NO: 203 - protein, 14 aa, Artificial Sequence
  Description of Artificial Sequence: Synthetic peptide
  CD3 High-Int[VL-VH] - [anti-CD3]_L1.47_ H1.31_scFv vlCDR1
GSSTGAVTTSNYAN

SEQ ID NO: 204 - protein, 7 aa, Artificial Sequence
  Description of Artificial Sequence: Synthetic peptide
  CD3 High-Int[VL-VH] - [anti-CD3]_L1.47_ H1.31_scFv vlCDR2
GTNKRAP

SEQ ID NO: 205 - protein, 9 aa, Artificial Sequence
  Description of Artificial Sequence: Synthetic peptide
  CD3 High-Int[VL-VH] - [anti-CD3]_L1.47_ H1.31_scFv vlCDR3
ALWYSNHWV

SEQ ID NO: 206 - protein, 125 aa, Artificial Sequence; identical to SEQ ID NO: 142
  Description of Artificial Sequence: Synthetic polypeptide
  CD3 High-Int[VL-VH] - [anti-CD3]_L1.47_ H1.31_scFv Variable Heavy (vh) Domain

SEQ ID NO: 207 - protein, 5 aa, Artificial Sequence
  Description of Artificial Sequence: Synthetic peptide
  CD3 High-Int[VL-VH] - [anti-CD3]_L1.47_ H1.31_scFv vhCDR1
TYAMS

SEQ ID NO: 208 - protein, 19 aa, Artificial Sequence
  Description of Artificial Sequence: Synthetic peptide
  CD3 High-Int[VL-VH] - [anti-CD3]_L1.47_ H1.31_scFv vhCDR2
RIRSKYNNYATYYADSVKG

SEQ ID NO: 209 - protein, 14 aa, Artificial Sequence
  Description of Artificial Sequence: Synthetic peptide
  CD3 High-Int[VL-VH] - [anti-CD3]_L1.47_ H1.31_scFv vhCDR3
HGNFGDSYVSWFAY

SEQ ID NO: 210 - protein, 20 aa, Artificial Sequence
  Description of Artificial Sequence: Synthetic peptide
  CD3 High-Int[VL-VH] - [anti-CD3]_L1.47_ H1.31_scFv Linker
GKPGSGKPGSGKPGSGKPGS

SEQ ID NO: 211 - protein, 875 aa, Homo sapiens [sequence omitted]

SEQ ID NO: 212 - protein, 845 aa, Homo sapiens
  sp|O14638|31-875
LLVIMSLGLGLGLGLRKLEKQGSCRKKCFDASFRGLENCRCDVACKDRGDCCWDFEDTCVESTRIWMCNKFRCGETRLEASLCSCSDDCLQRKDCCADYKSVCQGETSWLEENCDTAQQSQCPEGFDLPPVILFSMDGFRAEYLYTWDTLMPNINKLKTCGIHSKYMRAMYPTKTFPNHYTIVTGLYPESHGIIDNNMYDVNLNKNFSLSSKEQNNPAWWHGQPMWLTAMYQGLKAATYFWPGSEVAINGSFPSIYMPYNGSVPFEERISTLLKWLDLPKAERPRFYTMYFEEPDSSGHAGGPVSARVIKALQVVDHAFGMLMEGLKQRNLHNCVNIILLADHGMDQTYCNKMEYMTDYFPRINFFYMYEGPAPRIRAHNIPHDFFSFNSEEIVRNLSCRKPDQHFKPYLTPDLPKRLHYAKNVRIDKVHLFVDQQWLAVRSKSNTNCGGGNHGYNNEFRSMEAIFLAHGPSFKEKTEVEPFENIEVYNLMCDLLRIQPAPNNGTHGSLNHLLKVPFYEPSHAEEVSKFSVCGFANPLPTESLDCFCPHLQNSTQLEQVNQMLNLTQEEITATVKVNLPFGRPRVLQKNVDHCLLYHREYVSGFGKAMRMPMWSSYTVPQLGDTSPLPPTVPDCLRADVRVPPSESQKCSFYLADKNITHGFLYPPASNRTSDSQYDALITSNLVPMYEEFRKMWDYFHSVLLIKHATERNGVNVVSGPIFDYNYDGHFDAPDEITKHLANTDVPIPTHYFVVLTSCKNKSHTPENCPGWLDVLPFIIPHRPTNVESCPEGKPEALWVEERFTAHIARVRDVELLTGLDFYQDKVQPVSEILQLKTYLPTFETTI

SEQ ID NO: 213 - protein, 874 aa, Mus musculus
  sp|Q6DYE8
MDSRLALATEEPIKKDSLKKYKILCVVLLALLVIVSLGLGLGLGLRKPEEQGSCRKKCFDSSHRGLEGCRCDSGCTGRGDCCWDFEDTCVKSTQIWTCNLFRCGENRLETALCSCADDCLQRKDCCADYKTVCQGESPWVTEACASSQEPQCPPGFDLPPVILFSMDGFRAEYLQTWSTLLPNINKLKTCGIHSKYMRAMYPTKTFPNHYTIVTGLYPESHGIIDNNMYDVHLNKNFSLSSVEKSNPAWWSGQPIWLTAMYQGLKAACYYWPGSDVAVNGSFPTIYRNYSNSVPYERRITTLLQWLDLPKADRPSFYTIYVEEPDSAGHSSGPVSAGVIKALQSVDNAFGMLMEGLKQRNLHNCVNIIVLADHGMDQTSCDRVEYMTDYFPKINFYMYQGPAPRIRTRNIPQDFFTFNSEEIVRNLSCRKPDQHFKPYLTPDLPKRLHYAKNVRIDKAHLMVDRQWLAFRSKGSSNCGGGTHGYNNEFKSMEAIFLAHGPSFIEKTVIEPFENIEVYNLLCDLLHIEPAPNNGTHGSLNHLLKTPFYKPSHAGELSTPADCGFTTPLPTDPLDCSCPALQNTPGLEEQANQRLNLSEGEVAATVKANLPFGRPRVMQKNGDHCLLYHRDYISGYGKAMKMPMWSSYTVLKPGDTSSLPPTVPDCLRADVRVAPSESQKCSFYLADKNITHGFLYPAIKGTNESRYDALITSNLVPMYKEFKKMWDYFHEVLLIKYAIERNGLNVVSGPIFDYNYDGHFDAPDEITQYVAGTDVPIPTHYFVVLTSCKDQTHTPDSCPGWLDVLPFIVPHRPTNIESCSENKTEDLWVEERFQAHAARVRDVELLTGLDFYQEKAQPVSQILQLKTYLPTFETII

SEQ ID NO: 214 - protein, 844 aa, Mus musculus
  sp|Q6DYE8|31-874
LLVIVSLGLGLGLGLRKPEEQGSCRKKCFDSSHRGLEGCRCDSGCTGRGDCCWDFEDTCVKSTQIWTCNLFRCGENRLETALCSCADDCLQRKDCCADYKTVCQGESPWVTEACASSQEPQCPPGFDLPPVILFSMDGFRAEYLQTWSTLLPNINKLKTCGIHSKYMRAMYPTKTFPNHYTIVTGLYPESHGIIDNNMYDVHLNKNFSLSSVEKSNPAWWSGQPIWLTAMYQGLKAACYYWPGSDVAVNGSFPTIYRNYSNSVPYERRITTLLQWLDLPKADRPSFYTIYVEEPDSAGHSSGPVSAGVIKALQSVDNAFGMLMEGLKQRNLHNCVNIIVLADHGMDQTSCDRVEYMTDYFPKINFYMYQGPAPRIRTRNIPQDFFTFNSEEIVRNLSCRKPDQHFKPYLTPDLPKRLHYAKNVRIDKAHLMVDRQWLAFRSKGSSNCGGGTHGYNNEFKSMEAIFLAHGPSFIEKTVIEPFENIEVYNLLCDLLHIEPAPNNGTHGSLNHLLKTPFYKPSHAGELSTPADCGFTTPLPTDPLDCSCPALQNTPGLEEQANQRLNLSEGEVAATVKANLPFGRPRVMQKNGDHCLLYHRDYISGYGKAMKMPMWSSYTVLKPGDTSSLPPTVPDCLRADVRVAPSESQKCSFYLADKNITHGFLYPAIKGTNESRYDALITSNLVPMYKEFKKMWDYFHEVLLIKYAIERNGLNVVSGPIFDYNYDGHFDAPDEITQYVAGTDVPIPTHYFVVLTSCKDQTHTPDSCPGWLDVLPFIVPHRPTNIESCSENKTEDLWVEERFQAHAARVRDVELLTGLDFYQEKAQPVSQILQLKTYLPTFETII

SEQ ID NO: 215 - protein, 874 aa, Macaca fascicularis
  tr|A0A2K5TKP4
MESMLTLATEQPVKKNTLKKYKIACIVLLALLVIMSLGLGLGLGLRKLEKQGSCRKKCFDASFRGLENCRCDVACEDRGDCCWDFEDTCVESTRIWTCNKFRCGETRLEASLCSCSDDCLQRKDCCADYKSVCQGETSWLEENCDTAQQSQCPEGFDLPPVILFSMDGFRAEYLYTWDTLMPNINKLKTCGIHSKYMRAMYPTKTFPNHYTIVTGLYPESHGIIDNNMYDVNLNKNFSLSSEEQNNPAWWHGQPMWLTAMYQGLKAATYFWPGSEVAINGSFPSIYMPYNRSVPYEERISTLLKWLDLPKAERPSFYTMYFEEPDSSGHAGGPVSARVIKALQVVDHAFGMLMEGLKQRNLHNCVNIILLADHGMDQTYCNKMEYMTDYFPRINFYMYEGPAPRIRALNVPHDFFSCKYEDTYMKKRCRKPDQHFKPYLTPDLPKRLHYAKNVRIDKVHLFVDRQWLAVGSKSNTNCGGGNHGYNNEFRSMEAIFLAHGPSFKEKTEVEPFENIEVYNLMCDLLRIQPAPNNGTRGSLNHLLKVPFYEPSHAEEVSKFSVCGFANPLPTNNLSCLCPHLQNSIQLEQVNQMLNLTQEEITATVKVNLPFGRPRVLQKNVDNCLLYHREYVSGFGKAMRMPMWSSYTVPQLGDTSPLPPTVPDCLRADVRVPPSESQKCSFYLADENITHGFLYPPAINRTSDSQYDALIMSNLVPMYEEFRKMWDYFHSVLLIKHATERNGVNVVSGPIFDYNYDGHFDAPEEITKHIANTDIPIPTHYFVVLTSCKNKSHTPENCPGWLDVLPFIIPHRPTNVESCPEGKPEALWVEERFTAHIARVRDVELLTGLDFYQDKAQPVSEILQLKTYLPTFETTI

SEQ ID NO: 216 - protein, 844 aa, Macaca fascicularis
  tr|A0A2K5TKP4|31-874
LLVIMSLGLGLGLGLRKLEKQGSCRKKCFDASFRGLENCRCDVACEDRGDCCWDFEDTCVESTRIWTCNKFRCGETRLEASLCSCSDDCLQRKDCCADYKSVCQGETSWLEENCDTAQQSQCPEGFDLPPVILFSMDGFRAEYLYTWDTLMPNINKLKTCGIHSKYMRAMYPTKTFPNHYTIVTGLYPESHGIIDNNMYDVNLNKNFSLSSEEQNNPAWWHGQPMWLTAMYQGLKAATYFWPGSEVAINGSFPSIYMPYNRSVPYEERISTLLKWLDLPKAERPSFYTMYFEEPDSSGHAGGPVSARVIKALQVVDHAFGMLMEGLKQRNLHNCVNIILLADHGMDQTYCNKMEYMTDYFPRINFYMYEGPAPRIRALNVPHDFFSCKYEDTYMKKRCRKPDQHFKPYLTPDLPKRLHYAKNVRIDKVHLFVDRQWLAVGSKSNTNCGGGNHGYNNEFRSMEAIFLAHGPSFKEKTEVEPFENIEVYNLMCDLLRIQPAPNNGTRGSLNHLLKVPFYEPSHAEEVSKFSVCGFANPLPTNNLSCLCPHLQNSIQLEQVNQMLNLTQEEITATVKVNLPFGRPRVLQKNVDNCLLYHREYVSGFGKAMRMPMWSSYTVPQLGDTSPLPPTVPDCLRADVRVPPSESQKCSFYLADENITHGFLYPPAINRTSDSQYDALIMSNLVPMYEEFRKMWDYFHSVLLIKHATERNGVNVVSGPIFDYNYDGHFDAPEEITKHIANTDIPIPTHYFVVLTSCKNKSHTPENCPGWLDVLPFIIPHRPTNVESCPEGKPEALWVEERFTAHIARVRDVELLTGLDFYQDKAQPVSEILQLKTYLPTFETTI

SEQ ID NO: 217 - protein, 124 aa, Artificial Sequence
  Description of Artificial Sequence: Synthetic polypeptide
  MESO-A[MSLN]_H1.1_L1 Variable heavy (vh) domain
EVQLVESGGGLVQPGGSLKLSCAASGFDFSRYWMSWVRQAPGKGLEWVSEINPDSSTIVYTPSVKGRFTISRDNAKNSLYLQMNSLRAEDTAVYYCARRGSHYYGYRTGYFDVWGAGTTVTVSS

SEQ ID NO: 218 - protein, 5 aa, Artificial Sequence
  Description of Artificial Sequence: Synthetic peptide
  MESO-A[MSLN]_H1.1_L1 vhCDR1
RYWMS

SEQ ID NO: 219 - protein, 17 aa, Artificial Sequence
  Description of Artificial Sequence: Synthetic peptide
  MESO-A[MSLN]_H1.1_L1 vhCDR2
EINPDSSTIVYTPSVKG

SEQ ID NO: 220 - protein, 15 aa, Artificial Sequence
  Description of Artificial Sequence: Synthetic peptide
  MESO-A[MSLN]_H1.1_L1 vhCDR3
RGSHYYGYRTGYFDV

SEQ ID NO: 221 - protein, 106 aa, Artificial Sequence
  Description of Artificial Sequence: Synthetic polypeptide
  MESO-A[MSLN]_H1.1_L1 Variable light (vl) domain
DVVLTQSPATLSLSPGERATLSCRASSSVSYMYWHQQKPDQSPKLLIYDTSNLASGVPVRFSGSGSGTDYTLTISSLEPEDFAVYYCQQWSSYPPTFGGGTKLEIK

SEQ ID NO: 222 - protein, 10 aa, Artificial Sequence
  Description of Artificial Sequence: Synthetic peptide
  MESO-A[MSLN]_H1.1_L1 vlCDR1
RASSSVSYMY

SEQ ID NO: 223 - protein, 7 aa, Artificial Sequence
  Description of Artificial Sequence: Synthetic peptide
  MESO-A[MSLN]_H1.1_L1 vlCDR2
DTSNLAS

SEQ ID NO: 224 - protein, 9 aa, Artificial Sequence
  Description of Artificial Sequence: Synthetic peptide
  MESO-A[MSLN]_H1.1_L1 vlCDR3
QQWSSYPPT

SEQ ID NO: 225 - protein, 454 aa, Artificial Sequence
  Description of Artificial Sequence: Synthetic polypeptide
  XENP16249  Chain 1 - MESO-A[MSLN]_H1.1_IgG1 Heavy Chain
EVQLVESGGGLVQPGGSLKLSCAASGFDFSRYWMSWVRQAPGKGLEWVSEINPDSSTIVYTPSVKGRFTISRDNAKNSLYLQMNSLRAEDTAVYYCARRGSHYYGYRTGYFDVWGAGTTVTVSSASTKGPSVFPLAPSSKSTSGGTAALGCLVKDYFPEPVTVSWNSGALTSGVHTFPAVLQSSGLYSLSSVVTVPSSSLGTQTYICNVNHKPSNTKVDKKVEPKSCDKTHTCPPCPAPELLGGPSVFLFPPKPKDTLMISRTPEVTCVVVDVSHEDPEVKFNWYVDGVEVHNAKTKPREEQYNSTYRVVSVLTVLHQDWLNGKEYKCKVSNKALPAPIEKTISKAKGQPREPQVYTLPPSREEMTKNQVSLTCLVKGFYPSDIAVEWESNGQPENNYKTTPPVLDSDGSFFLYSKLTVDKSRWQQGNVFSCSVMHEALHNHYTQKSLSLSPGK

SEQ ID NO: 226 - protein, 213 aa, Artificial Sequence
  Description of Artificial Sequence: Synthetic polypeptide
  XENP16249  Chain 2 - MESO-A[MSLN]_L1 Light Chain
DVVLTQSPATLSLSPGERATLSCRASSSVSYMYWHQQKPDQSPKLLIYDTSNLASGVPVRFSGSGSGTDYTLTISSLEPEDFAVYYCQQWSSYPPTFGGGTKLEIKRTVAAPSVFIFPPSDEQLKSGTASVVCLLNNFYPREAKVQWKVDNALQSGNSQESVTEQDSKDSTYSLSSTLTLSKADYEKHKVYACEVTHQGLSSPVTKSFNRGEC

SEQ ID NO: 227 - protein, 453 aa, Artificial Sequence
  Description of Artificial Sequence: Synthetic polypeptide
  XENP16250  Chain 1 - MESO-A[MSLN]_H1.1_IgG1_PVA_/S267K Heav y Chain
EVQLVESGGGLVQPGGSLKLSCAASGFDFSRYWMSWVRQAPGKGLEWVSEINPDSSTIVYTPSVKGRFTISRDNAKNSLYLQMNSLRAEDTAVYYCARRGSHYYGYRTGYFDVWGAGTTVTVSSASTKGPSVFPLAPSSKSTSGGTAALGCLVKDYFPEPVTVSWNSGALTSGVHTFPAVLQSSGLYSLSSVVTVPSSSLGTQTYICNVNHKPSNTKVDKKVEPKSCDKTHTCPPCPAPPVAGPSVFLFPPKPKDTLMISRTPEVTCVVVDVKHEDPEVKFNWYVDGVEVHNAKTKPREEQYNSTYRVVSVLTVLHQDWLNGKEYKCKVSNKALPAPIEKTISKAKGQPREPQVYTLPPSREEMTKNQVSLTCLVKGFYPSDIAVEWESNGQPENNYKTTPPVLDSDGSFFLYSKLTVDKSRWQQGNVFSCSVMHEALHNHYTQKSLSLSPGK

SEQ ID NO: 228 - protein, 213 aa, Artificial Sequence; identical to SEQ ID NO: 226
  Description of Artificial Sequence: Synthetic polypeptide
  XENP16250  Chain 2 - MESO-A[MSLN]_L1 Light Chain

SEQ ID NO: 229 - protein, 453 aa, Artificial Sequence
  Description of Artificial Sequence: Synthetic polypeptide
  XENP16253 Chain 1 - MESO-A[MSLN]_H1.1_IgG1_pI(-)_Isosteric_ A_/PVA_/S267K/L368D/K370S Heavy Chain
EVQLVESGGGLVQPGGSLKLSCAASGFDFSRYWMSWVRQAPGKGLEWVSEINPDSSTIVYTPSVKGRFTISRDNAKNSLYLQMNSLRAEDTAVYYCARRGSHYYGYRTGYFDVWGAGTTVTVSSASTKGPSVFPLAPSSKSTSGGTAALGCLVKDYFPEPVTVSWNSGALTSGVHTFPAVLQSSGLYSLSSVVTVPSSSLGTQTYICNVNHKPSDTKVDKKVEPKSCDKTHTCPPCPAPPVAGPSVFLFPPKPKDTLMISRTPEVTCVVVDVKHEDPEVKFNWYVDGVEVHNAKTKPREEEYNSTYRVVSVLTVLHQDWLNGKEYKCKVSNKALPAPIEKTISKAKGQPREPQVYTLPPSREEMTKNQVSLTCDVSGFYPSDIAVEWESDGQPENNYKTTPPVLDSDGSFFLYSKLTVDKSRWEQGDVFSCSVMHEALHNHYTQKSLSLSPGK

SEQ ID NO: 230 - protein, 213 aa, Artificial Sequence; identical to SEQ ID NO: 226
  Description of Artificial Sequence: Synthetic polypeptide
  XENP16253 Chain 2 - MESO-A[MSLN]_L1 Light Chain

SEQ ID NO: 231 - protein, 123 aa, Artificial Sequence
  Description of Artificial Sequence: Synthetic polypeptide
  MESO-B[MSLN]_H0L0 Variable heavy (vh) domain
QVQLQQSGPGLVTPSQTLSLTCAISGDSVSSNSATWNWIRQSPSRGLEWLGRTYYRSKWYNDYAVSVKSRMSINPDTSKNQFSLQLNSVTPEDTAVYYCARGMMTYYYGMDVWGQGTTVTVSS

SEQ ID NO: 232 - protein, 7 aa, Artificial Sequence
  Description of Artificial Sequence: Synthetic peptide
  MESO-B[MSLN]_H0L0 vhCDR1
SNSATWN

SEQ ID NO: 233 - protein, 18 aa, Artificial Sequence
  Description of Artificial Sequence: Synthetic peptide
  MESO-B[MSLN]_H0L0 vhCDR2
RTYYRSKWYNDYAVSVKS

SEQ ID NO: 234 - protein, 11 aa, Artificial Sequence
  Description of Artificial Sequence: Synthetic peptide
  MESO-B[MSLN]_H0L0 vhCDR3
GMMTYYYGMDV

SEQ ID NO: 235 - protein, 115 aa, Artificial Sequence
  Description of Artificial Sequence: Synthetic polypeptide
  MESO-B[MSLN]_H0L0 Variable light (vl) domain
QPVLTQSSSLSASPGASASLTCTLRSGINVGPYRIYWYQQKPGSPPQYLLNYKSDSDKQQGSGVPSRFSGSKDASANAGVLLISGLRSEDEADYYCMIWHSSAAVFGGGTQLTVL

SEQ ID NO: 236 - protein, 14 aa, Artificial Sequence
  Description of Artificial Sequence: Synthetic peptide
  MESO-B[MSLN]_H0L0 vlCDR1
TLRSGINVGPYRIY

SEQ ID NO: 237 - protein, 7 aa, Artificial Sequence
  Description of Artificial Sequence: Synthetic peptide
  MESO-B[MSLN]_H0L0 vlCDR2
SDKQQGS

SEQ ID NO: 238 - protein, 9 aa, Artificial Sequence
  Description of Artificial Sequence: Synthetic peptide
  MESO-B[MSLN]_H0L0 vlCDR3
MIWHSSAAV

SEQ ID NO: 239 - protein, 453 aa, Artificial Sequence
  Description of Artificial Sequence: Synthetic polypeptide
  XENP16827  Chain 1 - MESO-B[MSLN]_H0_IgG1 Heavy Chain
QVQLQQSGPGLVTPSQTLSLTCAISGDSVSSNSATWNWIRQSPSRGLEWLGRTYYRSKWYNDYAVSVKSRMSINPDTSKNQFSLQLNSVTPEDTAVYYCARGMMTYYYGMDVWGQGTTVTVSSASTKGPSVFPLAPSSKSTSGGTAALGCLVKDYFPEPVTVSWNSGALTSGVHTFPAVLQSSGLYSLSSVVTVPSSSLGTQTYICNVNHKPSNTKVDKKVEPKSCDKTHTCPPCPAPELLGGPSVFLFPPKPKDTLMISRTPEVTCVVVDVSHEDPEVKFNWYVDGVEVHNAKTKPREEQYNSTYRVVSVLTVLHQDWLNGKEYKCKVSNKALPAPIEKTISKAKGQPREPQVYTLPPSREEMTKNQVSLTCLVKGFYPSDIAVEWESNGQPENNYKTTPPVLDSDGSFFLYSKLTVDKSRWQQGNVFSCSVMHEALHNHYTQKSLSLSPGK

SEQ ID NO: 240 - protein, 221 aa, Artificial Sequence
  Description of Artificial Sequence: Synthetic polypeptide
  XENP16827  Chain 2 - MESO-B[MSLN]_L0 Light Chain
QPVLTQSSSLSASPGASASLTCTLRSGINVGPYRIYWYQQKPGSPPQYLLNYKSDSDKQQGSGVPSRFSGSKDASANAGVLLISGLRSEDEADYYCMIWHSSAAVFGGGTQLTVLGQPKAAPSVTLFPPSSEELQANKATLVCLISDFYPGAVTVAWKADSSPVKAGVETTTPSKQSNNKYAASSYLSLTPEQWKSHRSYSCQVTHEGSTVEKTVAPTECS

SEQ ID NO: 241 - protein, 120 aa, Artificial Sequence
  Description of Artificial Sequence: Synthetic polypeptide
  MESO-C[MSLN]_H1L1 Variable heavy (vh) domain
QVQLVQSGAEVKKPGASVKVSCKASGYTFTSYWMHWVRQAPGQGLEWMGMIHPNSDNTIYYEKFQGRVTMTVDKSISTAYMELSRLRSDDTAVYYCAIIITPVVPKFDYWGQGTLVTVSS

SEQ ID NO: 242 - protein, 5 aa, Artificial Sequence
  Description of Artificial Sequence: Synthetic peptide
  MESO-C[MSLN]_H1L1 vhCDR1
SYWMH

SEQ ID NO: 243 - protein, 17 aa, Artificial Sequence
  Description of Artificial Sequence: Synthetic peptide
  MESO-C[MSLN]_H1L1 vhCDR2
MIHPNSDNTIYYEKFQG

SEQ ID NO: 244 - protein, 11 aa, Artificial Sequence
  Description of Artificial Sequence: Synthetic peptide
  MESO-C[MSLN]_H1L1 vhCDR3
IITPVVPKFDY

SEQ ID NO: 245 - protein, 107 aa, Artificial Sequence
  Description of Artificial Sequence: Synthetic polypeptide
  MESO-C[MSLN]_H1L1 Variable light (vl) domain
DIVMTQSPDSLAVSLGERATINCKASHDVGTSVAWYQQKPGQSPKLLIYWASTRHTGVPDRFTGSGSGTDFTLTISSLQAEDVAVYFCQQYSSYPLTFGAGTKLEIK

SEQ ID NO: 246 - protein, 11 aa, Artificial Sequence
  Description of Artificial Sequence: Synthetic peptide
  MESO-C[MSLN]_H1L1 vlCDR1
KASHDVGTSVA

SEQ ID NO: 247 - protein, 7 aa, Artificial Sequence
  Description of Artificial Sequence: Synthetic peptide
  MESO-C[MSLN]_H1L1 vlCDR2
WASTRHT

SEQ ID NO: 248 - protein, 9 aa, Artificial Sequence
  Description of Artificial Sequence: Synthetic peptide
  MESO-C[MSLN]_H1L1 vlCDR3
QQYSSYPLT

SEQ ID NO: 249 - protein, 449 aa, Artificial Sequence
  Description of Artificial Sequence: Synthetic polypeptide
  XENP31693 Chain 1 - MESO-C[MSLN]_H1_IgG1_PVA_/S267K Heavy C hain
QVQLVQSGAEVKKPGASVKVSCKASGYTFTSYWMHWVRQAPGQGLEWMGMIHPNSDNTIYYEKFQGRVTMTVDKSISTAYMELSRLRSDDTAVYYCAIIITPVVPKFDYWGQGTLVTVSSASTKGPSVFPLAPSSKSTSGGTAALGCLVKDYFPEPVTVSWNSGALTSGVHTFPAVLQSSGLYSLSSVVTVPSSSLGTQTYICNVNHKPSNTKVDKKVEPKSCDKTHTCPPCPAPPVAGPSVFLFPPKPKDTLMISRTPEVTCVVVDVKHEDPEVKFNWYVDGVEVHNAKTKPREEQYNSTYRVVSVLTVLHQDWLNGKEYKCKVSNKALPAPIEKTISKAKGQPREPQVYTLPPSREEMTKNQVSLTCLVKGFYPSDIAVEWESNGQPENNYKTTPPVLDSDGSFFLYSKLTVDKSRWQQGNVFSCSVMHEALHNHYTQKSLSLSPGK

SEQ ID NO: 250 - protein, 214 aa, Artificial Sequence
  Description of Artificial Sequence: Synthetic polypeptide
  XENP31693 Chain 2 - MESO-C[MSLN]_L1 Light Chain
DIVMTQSPDSLAVSLGERATINCKASHDVGTSVAWYQQKPGQSPKLLIYWASTRHTGVPDRFTGSGSGTDFTLTISSLQAEDVAVYFCQQYSSYPLTFGAGTKLEIKRTVAAPSVFIFPPSDEQLKSGTASVVCLLNNFYPREAKVQWKVDNALQSGNSQESVTEQDSKDSTYSLSSTLTLSKADYEKHKVYACEVTHQGLSSPVTKSFNRGEC

SEQ ID NO: 251 - protein, 120 aa, Artificial Sequence
  Description of Artificial Sequence: Synthetic polypeptide
  MESO-C[MSLN]_H1.1 Variable Heavy
QVQLVQSGAEVKKPGASVKVSCKASGYTFTGYWMHWVRQAPGQGLEWMGMIHPNSDNTIYYEKFQGRVTMTVDKSISTAYMELSRLRSDDTAVYYCAIIITPVVPKFDYWGQGTLVTVSS

SEQ ID NO: 252 - protein, 120 aa, Artificial Sequence
  Description of Artificial Sequence: Synthetic polypeptide
  MESO-C[MSLN]_H1.2 Variable Heavy
QVQLVQSGAEVKKPGASVKVSCKASGYTFTSYYMHWVRQAPGQGLEWMGMIHPNSDNTIYYEKFQGRVTMTVDKSISTAYMELSRLRSDDTAVYYCAIIITPVVPKFDYWGQGTLVTVSS

SEQ ID NO: 253 - protein, 120 aa, Artificial Sequence
  Description of Artificial Sequence: Synthetic polypeptide
  MESO-C[MSLN]_H1.3 Variable Heavy
QVQLVQSGAEVKKPGASVKVSCKASGYTFTSYWMHWVRQAPGQGLEWMGWIHPNSDNTIYYEKFQGRVTMTVDKSISTAYMELSRLRSDDTAVYYCAIIITPVVPKFDYWGQGTLVTVSS

SEQ ID NO: 254 - protein, 120 aa, Artificial Sequence
  Description of Artificial Sequence: Synthetic polypeptide
  MESO-C[MSLN]_H1.4 Variable Heavy
QVQLVQSGAEVKKPGASVKVSCKASGYTFTSYWMHWVRQAPGQGLEWMGMINPNSDNTIYYEKFQGRVTMTVDKSISTAYMELSRLRSDDTAVYYCAIIITPVVPKFDYWGQGTLVTVSS

SEQ ID NO: 255 - protein, 120 aa, Artificial Sequence
  Description of Artificial Sequence: Synthetic polypeptide
  MESO-C[MSLN]_H1.5 Variable Heavy
QVQLVQSGAEVKKPGASVKVSCKASGYTFTSYWMHWVRQAPGQGLEWMGMIHPQSDNTIYYEKFQGRVTMTVDKSISTAYMELSRLRSDDTAVYYCAIIITPVVPKFDYWGQGTLVTVSS

SEQ ID NO: 256 - protein, 120 aa, Artificial Sequence
  Description of Artificial Sequence: Synthetic polypeptide
  MESO-C[MSLN]_H1.6 Variable Heavy
QVQLVQSGAEVKKPGASVKVSCKASGYTFTSYWMHWVRQAPGQGLEWMGMIHPNSGNTIYYEKFQGRVTMTVDKSISTAYMELSRLRSDDTAVYYCAIIITPVVPKFDYWGQGTLVTVSS

SEQ ID NO: 257 - protein, 120 aa, Artificial Sequence
  Description of Artificial Sequence: Synthetic polypeptide
  MESO-C[MSLN]_H1.7 Variable Heavy
QVQLVQSGAEVKKPGASVKVSCKASGYTFTSYWMHWVRQAPGQGLEWMGMIHPNSDNTIYYEKFQGRVTMTVDKSISTAYMELSRLRSDDTAVYYCARIITPVVPKFDYWGQGTLVTVSS

SEQ ID NO: 258 - protein, 120 aa, Artificial Sequence
  Description of Artificial Sequence: Synthetic polypeptide
  MESO-C[MSLN]_H1.8 Variable Heavy
QVQLVQSGAEVKKPGASVKVSCKASGYTFTSYWMHWVRQAPGQGLEWMGMIHPNSDNTIYYEKFQGRVTMTVDKSISTAYMELSRLRSDDTAVYYCAIIISPVVPKFDYWGQGTLVTVSS

SEQ ID NO: 259 - protein, 120 aa, Artificial Sequence
  Description of Artificial Sequence: Synthetic polypeptide
  MESO-C[MSLN]_H1.9 Variable Heavy
QVQLVQSGAEVKKPGASVKVSCKASGYTFTSYWMHWVRQAPGQGLEWMGMIHPNSDNTIYYEKFQGRVTMTVDKSISTAYMELSRLRSDDTAVYYCAIIITPVVPRFDYWGQGTLVTVSS

SEQ ID NO: 260 - protein, 120 aa, Artificial Sequence
  Description of Artificial Sequence: Synthetic polypeptide
  MESO-C[MSLN]_H1.12 Variable Heavy
QVQLVQSGAEVKKPGASVKVSCKASGYTFTSYWMHWVRQAPGQGLEWMGMIHPNSDNTIYYQKFQGRVTMTVDKSISTAYMELSRLRSDDTAVYYCAIIITPVVPKFDYWGQGTLVTVSS

SEQ ID NO: 261 - protein, 120 aa, Artificial Sequence
  Description of Artificial Sequence: Synthetic polypeptide
  MESO-C[MSLN]_H1.13 Variable Heavy
QVQLVQSGAEVKKPGASVKVSCKASGYTFTSYWMHWVRQAPGQGLEWMGMIHPNSDNTIYYYKFQGRVTMTVDKSISTAYMELSRLRSDDTAVYYCAIIITPVVPKFDYWGQGTLVTVSS

SEQ ID NO: 262 - protein, 107 aa, Artificial Sequence
  Description of Artificial Sequence: Synthetic polypeptide
  MESO-C[MSLN]_L1.1 Variable Light
DIVMTQSPDSLAVSLGERATINCKSSHDVGTSVAWYQQKPGQSPKLLIYWASTRHTGVPDRFTGSGSGTDFTLTISSLQAEDVAVYFCQQYSSYPLTFGAGTKLEIK

SEQ ID NO: 263 - protein, 107 aa, Artificial Sequence
  Description of Artificial Sequence: Synthetic polypeptide
  MESO-C[MSLN]_L1.2 Variable Light
DIVMTQSPDSLAVSLGERATINCKASQDVGTSVAWYQQKPGQSPKLLIYWASTRHTGVPDRFTGSGSGTDFTLTISSLQAEDVAVYFCQQYSSYPLTFGAGTKLEIK

SEQ ID NO: 264 - protein, 107 aa, Artificial Sequence
  Description of Artificial Sequence: Synthetic polypeptide
  MESO-C[MSLN]_L1.3 Variable Light
DIVMTQSPDSLAVSLGERATINCKASHSVGTSVAWYQQKPGQSPKLLIYWASTRHTGVPDRFTGSGSGTDFTLTISSLQAEDVAVYFCQQYSSYPLTFGAGTKLEIK

SEQ ID NO: 265 - protein, 107 aa, Artificial Sequence
  Description of Artificial Sequence: Synthetic polypeptide
  MESO-C[MSLN]_L1.4 Variable Light
DIVMTQSPDSLAVSLGERATINCKASHDVLTSVAWYQQKPGQSPKLLIYWASTRHTGVPDRFTGSGSGTDFTLTISSLQAEDVAVYFCQQYSSYPLTFGAGTKLEIK

SEQ ID NO: 266 - protein, 107 aa, Artificial Sequence
  Description of Artificial Sequence: Synthetic polypeptide
  MESO-C[MSLN]_L1.5 Variable Light
DIVMTQSPDSLAVSLGERATINCKASHDVGTYVAWYQQKPGQSPKLLIYWASTRHTGVPDRFTGSGSGTDFTLTISSLQAEDVAVYFCQQYSSYPLTFGAGTKLEIK

SEQ ID NO: 267 - protein, 107 aa, Artificial Sequence
  Description of Artificial Sequence: Synthetic polypeptide
  MESO-C[MSLN]_L1.6 Variable Light
DIVMTQSPDSLAVSLGERATINCKASHDVGTSLAWYQQKPGQSPKLLIYWASTRHTGVPDRFTGSGSGTDFTLTISSLQAEDVAVYFCQQYSSYPLTFGAGTKLEIK

SEQ ID NO: 268 - protein, 107 aa, Artificial Sequence
  Description of Artificial Sequence: Synthetic polypeptide
  MESO-C[MSLN]_L1.7 Variable Light
DIVMTQSPDSLAVSLGERATINCKASHDVGTSVAWYQQKPGQSPKLLIYWASTRETGVPDRFTGSGSGTDFTLTISSLQAEDVAVYFCQQYSSYPLTFGAGTKLEIK

SEQ ID NO: 269 - protein, 107 aa, Artificial Sequence
  Description of Artificial Sequence: Synthetic polypeptide
  MESO-C[MSLN]_L1.8 Variable Light
DIVMTQSPDSLAVSLGERATINCKASHDVGTSVAWYQQKPGQSPKLLIYWASTRHSGVPDRFTGSGSGTDFTLTISSLQAEDVAVYFCQQYSSYPLTFGAGTKLEIK

SEQ ID NO: 270 - protein, 107 aa, Artificial Sequence
  Description of Artificial Sequence: Synthetic polypeptide
  MESO-C[MSLN]_L1.9 Variable Light
DIVMTQSPDSLAVSLGERATINCKASHDVGTSVAWYQQKPGQSPKLLIYWASTRHTGVPDRFTGSGSGTDFTLTISSLQAEDVAVYFCQQYYSYPLTFGAGTKLEIK

SEQ ID NO: 271 - protein, 107 aa, Artificial Sequence
  Description of Artificial Sequence: Synthetic polypeptide
  MESO-C[MSLN]_L1.10 Variable Light
DIVMTQSPDSLAVSLGERATINCKASHDVGTSVAWYQQKPGQSPKLLIYWASTRHTGVPDRFTGSGSGTDFTLTISSLQAEDVAVYFCQQYSSTPLTFGAGTKLEIK

SEQ ID NO: 272 - protein, 107 aa, Artificial Sequence
  Description of Artificial Sequence: Synthetic polypeptide
  MESO-C[MSLN]_L1.13 Variable Light
DIVMTQSPDSLAVSLGERATINCKASHDVGQSVAWYQQKPGQSPKLLIYWASTRHTGVPDRFTGSGSGTDFTLTISSLQAEDVAVYFCQQYSSYPLTFGAGTKLEIK

SEQ ID NO: 273 - protein, 107 aa, Artificial Sequence
  Description of Artificial Sequence: Synthetic polypeptide
  MESO-C[MSLN]_L1.14 Variable Light
DIVMTQSPDSLAVSLGERATINCKASHDVGTSVAWYQQKPGQSPKLLIYWASTRHTGVPDRFTGSGSGTDFTLTISSLQAEDVAVYFCQQYSSFPLTFGAGTKLEIK

SEQ ID NO: 274 - protein, 107 aa, Artificial Sequence
  Description of Artificial Sequence: Synthetic polypeptide
  MESO-C[MSLN]_L1.15 Variable Light
DIVMTQSPDSLAVSLGERATINCKASHDVGTSVAWYQQKPGQSPKLLIYWASTRHTGVPDRFTGSGSGTDFTLTISSLQAEDVAVYFCQQYSSLPLTFGAGTKLEIK

SEQ ID NO: 275 - protein, 107 aa, Artificial Sequence
  Description of Artificial Sequence: Synthetic polypeptide
  MESO-C[MSLN]_L1.16 Variable Light
DIVMTQSPDSLAVSLGERATINCKASHDVGTSVAWYQQKPGQSPKLLIYWASTRHTGVPDRFTGSGSGTDFTLTISSLQAEDVAVYFCQQYSSVPLTFGAGTKLEIK

SEQ ID NO: 276 - protein, 107 aa, Artificial Sequence
  Description of Artificial Sequence: Synthetic polypeptide
  MESO-C[MSLN]_L1.17 Variable Light
DIVMTQSPDSLAVSLGERATINCKASHDVGTSVAWYQQKPGQSPKLLIYWASTRHTGVPDRFTGSGSGTDFTLTISSLQAEDVAVYFCQQYSSIPLTFGAGTKLEIK

SEQ ID NO: 277 - protein, 107 aa, Artificial Sequence
  Description of Artificial Sequence: Synthetic polypeptide
  MESO-C[MSLN]_L1.18 Variable Light
DIVMTQSPDSLAVSLGERATINCKASHDVGTSVAWYQQKPGQSPKLLIYWASTRHTGVPDRFTGSGSGTDFTLTISSLQAEDVAVYFCQQYSSHPLTFGAGTKLEIK

SEQ ID NO: 278 - protein, 107 aa, Artificial Sequence
  Description of Artificial Sequence: Synthetic polypeptide
  MESO-C[MSLN]_L1.19 Variable Light
DIVMTQSPDSLAVSLGERATINCKASHDVGTYVAWYQQKPGQSPKLLIYWASTRHTGVPDRFTGSGSGTDFTLTISSLQAEDVAVYFCQQYYSYPLTFGAGTKLEIK

SEQ ID NO: 279 - protein, 107 aa, Artificial Sequence
  Description of Artificial Sequence: Synthetic polypeptide
  MESO-C[MSLN]_L1.20 Variable Light
DIVMTQSPDSLAVSLGERATINCKASHDVGTSVAWYQQKPGQSPKLLIYWASTRHTGVPDRFTGSGSGTDFTLTISSLQAEDVAVYFCQQYYSFPLTFGAGTKLEIK

SEQ ID NO: 280 - protein, 107 aa, Artificial Sequence
  Description of Artificial Sequence: Synthetic polypeptide
  MESO-C[MSLN]_L1.21 Variable Light
DIVMTQSPDSLAVSLGERATINCKASHDVGTSVAWYQQKPGQSPKLLIYWASTRHTGVPDRFTGSGSGTDFTLTISSLQAEDVAVYFCQQYYSVPLTFGAGTKLEIK

SEQ ID NO: 281 - protein, 107 aa, Artificial Sequence
  Description of Artificial Sequence: Synthetic polypeptide
  MESO-C[MSLN]_L1.22 Variable Light
DIVMTQSPDSLAVSLGERATINCKASHDVGTSVAWYQQKPGQSPKLLIYWASTRHTGVPDRFTGSGSGTDFTLTISSLQAEDVAVYFCQQYYSIPLTFGAGTKLEIK

SEQ ID NO: 282 - protein, 453 aa, Artificial Sequence; identical to SEQ ID NO: 229
  Description of Artificial Sequence: Synthetic polypeptide
  XENP16248 Chain 1 - MESO-A[MSLN]_H1.1_IgG1_pI(-)_Isosteric_ A_/PVA_/S267K/L368D/K370S

SEQ ID NO: 283 - protein, 485 aa, Artificial Sequence
  Description of Artificial Sequence: Synthetic polypeptide
  XENP16248 Chain 2 - [CD3]_H1.30_L1.47_scFv(GKPGS)4_Fc(216)_ IgG1_C220S/PVA_/S267K/S364K/E357Q
EVQLVESGGGLVQPGGSLRLSCAASGFTFSTYAMNWVRQAPGKGLEWVGRIRSKYNNYATYYADSVKGRFTISRDDSKNTLYLQMNSLRAEDTAVYYCVRHGNFGDSYVSWFAYWGQGTLVTVSSGKPGSGKPGSGKPGSGKPGSQAVVTQEPSLTVSPGGTVTLTCGSSTGAVTTSNYANWVQQKPGKSPRGLIGGTNKRAPGVPARFSGSLLGGKAALTISGAQPEDEADYYCALWYSNHWVFGGGTKLTVLEPKSSDKTHTCPPCPAPPVAGPSVFLFPPKPKDTLMISRTPEVTCVVVDVKHEDPEVKFNWYVDGVEVHNAKTKPREEQYNSTYRVVSVLTVLHQDWLNGKEYKCKVSNKALPAPIEKTISKAKGQPREPQVYTLPPSREQMTKNQVKLTCLVKGFYPSDIAVEWESNGQPENNYKTTPPVLDSDGSFFLYSKLTVDKSRWQQGNVFSCSVMHEALHNHYTQKSLSLSPGK

SEQ ID NO: 284 - protein, 213 aa, Artificial Sequence; identical to SEQ ID NO: 226
  Description of Artificial Sequence: Synthetic polypeptide
  XENP16248 Chain 3 - MESO-A[MSLN]_L1 Light Chain

SEQ ID NO: 285 - protein, 452 aa, Artificial Sequence
  Description of Artificial Sequence: Synthetic polypeptide
  XENP16833 Chain 1 - MESO-B[MSLN]_H0L0_Fab_IgG1_pI(-)_Isoste ric_A_/PVA_/S267K/L368D/K370S
QVQLQQSGPGLVTPSQTLSLTCAISGDSVSSNSATWNWIRQSPSRGLEWLGRTYYRSKWYNDYAVSVKSRMSINPDTSKNQFSLQLNSVTPEDTAVYYCARGMMTYYYGMDVWGQGTTVTVSSASTKGPSVFPLAPSSKSTSGGTAALGCLVKDYFPEPVTVSWNSGALTSGVHTFPAVLQSSGLYSLSSVVTVPSSSLGTQTYICNVNHKPSDTKVDKKVEPKSCDKTHTCPPCPAPPVAGPSVFLFPPKPKDTLMISRTPEVTCVVVDVKHEDPEVKFNWYVDGVEVHNAKTKPREEEYNSTYRVVSVLTVLHQDWLNGKEYKCKVSNKALPAPIEKTISKAKGQPREPQVYTLPPSREEMTKNQVSLTCDVSGFYPSDIAVEWESDGQPENNYKTTPPVLDSDGSFFLYSKLTVDKSRWEQGDVFSCSVMHEALHNHYTQKSLSLSPGK

SEQ ID NO: 286 - protein, 485 aa, Artificial Sequence; identical to SEQ ID NO: 283
  Description of Artificial Sequence: Synthetic polypeptide
  XENP16833 Chain 2 - [CD3]_H1.30_L1.47_scFv(GKPGS)4_Fc(216)_ IgG1_C220S/PVA_/S267K/S364K/E357Q

SEQ ID NO: 287 - protein, 221 aa, Artificial Sequence; identical to SEQ ID NO: 240
  Description of Artificial Sequence: Synthetic polypeptide
  XENP16833 Chain 3 - MESO-B[MSLN]_L0 Light Chain

SEQ ID NO: 288 - protein, 449 aa, Artificial Sequence
  Description of Artificial Sequence: Synthetic polypeptide
  XENP31697 Chain 1 - MESO-C[MSLN]_H1_IgG1_pI(-)_Isosteric_A_ /PVA_/S267K/L368D/K370S
QVQLVQSGAEVKKPGASVKVSCKASGYTFTSYWMHWVRQAPGQGLEWMGMIHPNSDNTIYYEKFQGRVTMTVDKSISTAYMELSRLRSDDTAVYYCAIIITPVVPKFDYWGQGTLVTVSSASTKGPSVFPLAPSSKSTSGGTAALGCLVKDYFPEPVTVSWNSGALTSGVHTFPAVLQSSGLYSLSSVVTVPSSSLGTQTYICNVNHKPSDTKVDKKVEPKSCDKTHTCPPCPAPPVAGPSVFLFPPKPKDTLMISRTPEVTCVVVDVKHEDPEVKFNWYVDGVEVHNAKTKPREEEYNSTYRVVSVLTVLHQDWLNGKEYKCKVSNKALPAPIEKTISKAKGQPREPQVYTLPPSREEMTKNQVSLTCDVSGFYPSDIAVEWESDGQPENNYKTTPPVLDSDGSFFLYSKLTVDKSRWEQGDVFSCSVMHEALHNHYTQKSLSLSPGK

SEQ ID NO: 289 - protein, 485 aa, Artificial Sequence; identical to SEQ ID NO: 283
  Description of Artificial Sequence: Synthetic polypeptide
  XENP31697 Chain 2 - [CD3]_H1.30_L1.47_scFv(GKPGS)4_Fc(216)_ IgG1_C220S/PVA_/S267K/S364K/E357Q

SEQ ID NO: 290 - protein, 214 aa, Artificial Sequence; identical to SEQ ID NO: 250
  Description of Artificial Sequence: Synthetic polypeptide
  XENP31697 Chain 3 - MESO-C[MSLN]_L1 Light Chain

SEQ ID NO: 291 - protein, 449 aa, Artificial Sequence
  Description of Artificial Sequence: Synthetic polypeptide
  XENP32550 Chain 1 - MESO-C[MSLN]_H1.1_IgG1_pI(-)_Isosteric_ A_/PVA_/S267K/L368D/K370S
QVQLVQSGAEVKKPGASVKVSCKASGYTFTGYWMHWVRQAPGQGLEWMGMIHPNSDNTIYYEKFQGRVTMTVDKSISTAYMELSRLRSDDTAVYYCAIIITPVVPKFDYWGQGTLVTVSSASTKGPSVFPLAPSSKSTSGGTAALGCLVKDYFPEPVTVSWNSGALTSGVHTFPAVLQSSGLYSLSSVVTVPSSSLGTQTYICNVNHKPSDTKVDKKVEPKSCDKTHTCPPCPAPPVAGPSVFLFPPKPKDTLMISRTPEVTCVVVDVKHEDPEVKFNWYVDGVEVHNAKTKPREEEYNSTYRVVSVLTVLHQDWLNGKEYKCKVSNKALPAPIEKTISKAKGQPREPQVYTLPPSREEMTKNQVSLTCDVSGFYPSDIAVEWESDGQPENNYKTTPPVLDSDGSFFLYSKLTVDKSRWEQGDVFSCSVMHEALHNHYTQKSLSLSPGK

SEQ ID NO: 292 - protein, 485 aa, Artificial Sequence; identical to SEQ ID NO: 283
  Description of Artificial Sequence: Synthetic polypeptide
  XENP32550 Chain 2 - MESO-C[MSLN]_H1.1_[CD3]_H1.30_L1.47_scF v(GKPGS)4_Fc(216)_IgG1_C220S/PVA_/S267K/S364K/E357Q

SEQ ID NO: 293 - protein, 214 aa, Artificial Sequence; identical to SEQ ID NO: 250
  Description of Artificial Sequence: Synthetic polypeptide
  XENP32550 Chain 3 - MESO-C[MSLN]_L1 Light Chain

SEQ ID NO: 294 - protein, 449 aa, Artificial Sequence
  Description of Artificial Sequence: Synthetic polypeptide
  XENP32551 Chain 1 - MESO-C[MSLN]_H1.2_IgG1_pI(-)_Isosteric_ A_/PVA_/S267K/L368D/K370S
QVQLVQSGAEVKKPGASVKVSCKASGYTFTSYYMHWVRQAPGQGLEWMGMIHPNSDNTIYYEKFQGRVTMTVDKSISTAYMELSRLRSDDTAVYYCAIIITPVVPKFDYWGQGTLVTVSSASTKGPSVFPLAPSSKSTSGGTAALGCLVKDYFPEPVTVSWNSGALTSGVHTFPAVLQSSGLYSLSSVVTVPSSSLGTQTYICNVNHKPSDTKVDKKVEPKSCDKTHTCPPCPAPPVAGPSVFLFPPKPKDTLMISRTPEVTCVVVDVKHEDPEVKFNWYVDGVEVHNAKTKPREEEYNSTYRVVSVLTVLHQDWLNGKEYKCKVSNKALPAPIEKTISKAKGQPREPQVYTLPPSREEMTKNQVSLTCDVSGFYPSDIAVEWESDGQPENNYKTTPPVLDSDGSFFLYSKLTVDKSRWEQGDVFSCSVMHEALHNHYTQKSLSLSPGK

SEQ ID NO: 295 - protein, 485 aa, Artificial Sequence; identical to SEQ ID NO: 283
  Description of Artificial Sequence: Synthetic polypeptide
  XENP32551 Chain 2 - MESO-C[MSLN]_H1.2_[CD3]_H1.30_L1.47_scF v(GKPGS)4_Fc(216)_IgG1_C220S/PVA_/S267K/S364K/E357Q

SEQ ID NO: 296 - protein, 214 aa, Artificial Sequence; identical to SEQ ID NO: 250
  Description of Artificial Sequence: Synthetic polypeptide
  XENP32551 Chain 3 - MESO-C[MSLN]_L1 Light Chain

SEQ ID NO: 297 - protein, 449 aa, Artificial Sequence
  Description of Artificial Sequence: Synthetic polypeptide
  XENP32552 Chain 1 - MESO-C[MSLN]_H1.3_IgG1_pI(-)_Isosteric_ A_/PVA_/S267K/L368D/K370S
QVQLVQSGAEVKKPGASVKVSCKASGYTFTSYWMHWVRQAPGQGLEWMGWIHPNSDNTIYYEKFQGRVTMTVDKSISTAYMELSRLRSDDTAVYYCAIIITPVVPKFDYWGQGTLVTVSSASTKGPSVFPLAPSSKSTSGGTAALGCLVKDYFPEPVTVSWNSGALTSGVHTFPAVLQSSGLYSLSSVVTVPSSSLGTQTYICNVNHKPSDTKVDKKVEPKSCDKTHTCPPCPAPPVAGPSVFLFPPKPKDTLMISRTPEVTCVVVDVKHEDPEVKFNWYVDGVEVHNAKTKPREEEYNSTYRVVSVLTVLHQDWLNGKEYKCKVSNKALPAPIEKTISKAKGQPREPQVYTLPPSREEMTKNQVSLTCDVSGFYPSDIAVEWESDGQPENNYKTTPPVLDSDGSFFLYSKLTVDKSRWEQGDVFSCSVMHEALHNHYTQKSLSLSPGK

SEQ ID NO: 298 - protein, 485 aa, Artificial Sequence; identical to SEQ ID NO: 283
  Description of Artificial Sequence: Synthetic polypeptide
  XENP32552 Chain 2 - MESO-C[MSLN]_H1.3_[CD3]_H1.30_L1.47_scF v(GKPGS)4_Fc(216)_IgG1_C220S/PVA_/S267K/S364K/E357Q

SEQ ID NO: 299 - protein, 214 aa, Artificial Sequence; identical to SEQ ID NO: 250
  Description of Artificial Sequence: Synthetic polypeptide
  XENP32552 Chain 3 - MESO-C[MSLN]_L1 Light Chain

SEQ ID NO: 300 - protein, 449 aa, Artificial Sequence
  Description of Artificial Sequence: Synthetic polypeptide
  XENP32553 Chain 1 - MESO-C[MSLN]_H1.4_IgG1_pI(-)_Isosteric_ A_/PVA_/S267K/L368D/K370S
QVQLVQSGAEVKKPGASVKVSCKASGYTFTSYWMHWVRQAPGQGLEWMGMINPNSDNTIYYEKFQGRVTMTVDKSISTAYMELSRLRSDDTAVYYCAIIITPVVPKFDYWGQGTLVTVSSASTKGPSVFPLAPSSKSTSGGTAALGCLVKDYFPEPVTVSWNSGALTSGVHTFPAVLQSSGLYSLSSVVTVPSSSLGTQTYICNVNHKPSDTKVDKKVEPKSCDKTHTCPPCPAPPVAGPSVFLFPPKPKDTLMISRTPEVTCVVVDVKHEDPEVKFNWYVDGVEVHNAKTKPREEEYNSTYRVVSVLTVLHQDWLNGKEYKCKVSNKALPAPIEKTISKAKGQPREPQVYTLPPSREEMTKNQVSLTCDVSGFYPSDIAVEWESDGQPENNYKTTPPVLDSDGSFFLYSKLTVDKSRWEQGDVFSCSVMHEALHNHYTQKSLSLSPGK

SEQ ID NO: 301 - protein, 485 aa, Artificial Sequence; identical to SEQ ID NO: 283
  Description of Artificial Sequence: Synthetic polypeptide
  XENP32553 Chain 2 - MESO-C[MSLN]_H1.4_[CD3]_H1.30_L1.47_scF v(GKPGS)4_Fc(216)_IgG1_C220S/PVA_/S267K/S364K/E357Q

SEQ ID NO: 302 - protein, 214 aa, Artificial Sequence; identical to SEQ ID NO: 250
  Description of Artificial Sequence: Synthetic polypeptide
  XENP32553 Chain 3 - MESO-C[MSLN]_L1 Light Chain

SEQ ID NO: 303 - protein, 449 aa, Artificial Sequence
  Description of Artificial Sequence: Synthetic polypeptide
  XENP32554 Chain 1 - MESO-C[MSLN]_H1.5_IgG1_pI(-)_Isosteric_ A_/PVA_/S267K/L368D/K370S
QVQLVQSGAEVKKPGASVKVSCKASGYTFTSYWMHWVRQAPGQGLEWMGMIHPQSDNTIYYEKFQGRVTMTVDKSISTAYMELSRLRSDDTAVYYCAIIITPVVPKFDYWGQGTLVTVSSASTKGPSVFPLAPSSKSTSGGTAALGCLVKDYFPEPVTVSWNSGALTSGVHTFPAVLQSSGLYSLSSVVTVPSSSLGTQTYICNVNHKPSDTKVDKKVEPKSCDKTHTCPPCPAPPVAGPSVFLFPPKPKDTLMISRTPEVTCVVVDVKHEDPEVKFNWYVDGVEVHNAKTKPREEEYNSTYRVVSVLTVLHQDWLNGKEYKCKVSNKALPAPIEKTISKAKGQPREPQVYTLPPSREEMTKNQVSLTCDVSGFYPSDIAVEWESDGQPENNYKTTPPVLDSDGSFFLYSKLTVDKSRWEQGDVFSCSVMHEALHNHYTQKSLSLSPGK

SEQ ID NO: 304 - protein, 485 aa, Artificial Sequence; identical to SEQ ID NO: 283
  Description of Artificial Sequence: Synthetic polypeptide
  XENP32554 Chain 2 - MESO-C[MSLN]_H1.5_[CD3]_H1.30_L1.47_scF v(GKPGS)4_Fc(216)_IgG1_C220S/PVA_/S267K/S364K/E357Q

SEQ ID NO: 305 - protein, 214 aa, Artificial Sequence; identical to SEQ ID NO: 250
  Description of Artificial Sequence: Synthetic polypeptide
  XENP32554 Chain 3 - MESO-C[MSLN]_L1 Light Chain

SEQ ID NO: 306 - protein, 449 aa, Artificial Sequence
  Description of Artificial Sequence: Synthetic polypeptide
  XENP32555 Chain 1 - MESO-C[MSLN]_H1.6_IgG1_pI(-)_Isosteric_ A_/PVA_/S267K/L368D/K370S
QVQLVQSGAEVKKPGASVKVSCKASGYTFTSYWMHWVRQAPGQGLEWMGMIHPNSGNTIYYEKFQGRVTMTVDKSISTAYMELSRLRSDDTAVYYCAIIITPVVPKFDYWGQGTLVTVSSASTKGPSVFPLAPSSKSTSGGTAALGCLVKDYFPEPVTVSWNSGALTSGVHTFPAVLQSSGLYSLSSVVTVPSSSLGTQTYICNVNHKPSDTKVDKKVEPKSCDKTHTCPPCPAPPVAGPSVFLFPPKPKDTLMISRTPEVTCVVVDVKHEDPEVKFNWYVDGVEVHNAKTKPREEEYNSTYRVVSVLTVLHQDWLNGKEYKCKVSNKALPAPIEKTISKAKGQPREPQVYTLPPSREEMTKNQVSLTCDVSGFYPSDIAVEWESDGQPENNYKTTPPVLDSDGSFFLYSKLTVDKSRWEQGDVFSCSVMHEALHNHYTQKSLSLSPGK

SEQ ID NO: 307 - protein, 485 aa, Artificial Sequence; identical to SEQ ID NO: 283
  Description of Artificial Sequence: Synthetic polypeptide
  XENP32555 Chain 2 - MESO-C[MSLN]_H1.6_[CD3]_H1.30_L1.47_scF v(GKPGS)4_Fc(216)_IgG1_C220S/PVA_/S267K/S364K/E357Q

SEQ ID NO: 308 - protein, 214 aa, Artificial Sequence; identical to SEQ ID NO: 250
  Description of Artificial Sequence: Synthetic polypeptide
  XENP32555 Chain 3 - MESO-C[MSLN]_L1 Light Chain

SEQ ID NO: 309 - protein, 449 aa, Artificial Sequence
  Description of Artificial Sequence: Synthetic polypeptide
  XENP32556 Chain 1 - MESO-C[MSLN]_H1.7_IgG1_pI(-)_Isosteric_ A_/PVA_/S267K/L368D/K370S
QVQLVQSGAEVKKPGASVKVSCKASGYTFTSYWMHWVRQAPGQGLEWMGMIHPNSDNTIYYEKFQGRVTMTVDKSISTAYMELSRLRSDDTAVYYCARIITPVVPKFDYWGQGTLVTVSSASTKGPSVFPLAPSSKSTSGGTAALGCLVKDYFPEPVTVSWNSGALTSGVHTFPAVLQSSGLYSLSSVVTVPSSSLGTQTYICNVNHKPSDTKVDKKVEPKSCDKTHTCPPCPAPPVAGPSVFLFPPKPKDTLMISRTPEVTCVVVDVKHEDPEVKFNWYVDGVEVHNAKTKPREEEYNSTYRVVSVLTVLHQDWLNGKEYKCKVSNKALPAPIEKTISKAKGQPREPQVYTLPPSREEMTKNQVSLTCDVSGFYPSDIAVEWESDGQPENNYKTTPPVLDSDGSFFLYSKLTVDKSRWEQGDVFSCSVMHEALHNHYTQKSLSLSPGK

SEQ ID NO: 310 - protein, 485 aa, Artificial Sequence; identical to SEQ ID NO: 283
  Description of Artificial Sequence: Synthetic polypeptide
  XENP32556 Chain 2 - MESO-C[MSLN]_H1.7_[CD3]_H1.30_L1.47_scF v(GKPGS)4_Fc(216)_IgG1_C220S/PVA_/S267K/S364K/E357Q

SEQ ID NO: 311 - protein, 214 aa, Artificial Sequence; identical to SEQ ID NO: 250
  Description of Artificial Sequence: Synthetic polypeptide
  XENP32556 Chain 3 - MESO-C[MSLN]_L1 Light Chain

SEQ ID NO: 312 - protein, 449 aa, Artificial Sequence
  Description of Artificial Sequence: Synthetic polypeptide
  XENP32557 Chain 1 - MESO-C[MSLN]_H1.8_IgG1_pI(-)_Isosteric_ A_/PVA_/S267K/L368D/K370S
QVQLVQSGAEVKKPGASVKVSCKASGYTFTSYWMHWVRQAPGQGLEWMGMIHPNSDNTIYYEKFQGRVTMTVDKSISTAYMELSRLRSDDTAVYYCAIIISPVVPKFDYWGQGTLVTVSSASTKGPSVFPLAPSSKSTSGGTAALGCLVKDYFPEPVTVSWNSGALTSGVHTFPAVLQSSGLYSLSSVVTVPSSSLGTQTYICNVNHKPSDTKVDKKVEPKSCDKTHTCPPCPAPPVAGPSVFLFPPKPKDTLMISRTPEVTCVVVDVKHEDPEVKFNWYVDGVEVHNAKTKPREEEYNSTYRVVSVLTVLHQDWLNGKEYKCKVSNKALPAPIEKTISKAKGQPREPQVYTLPPSREEMTKNQVSLTCDVSGFYPSDIAVEWESDGQPENNYKTTPPVLDSDGSFFLYSKLTVDKSRWEQGDVFSCSVMHEALHNHYTQKSLSLSPGK

SEQ ID NO: 313 - protein, 485 aa, Artificial Sequence; identical to SEQ ID NO: 283
  Description of Artificial Sequence: Synthetic polypeptide
  XENP32557 Chain 2 - MESO-C[MSLN]_H1.8_[CD3]_H1.30_L1.47_scF v(GKPGS)4_Fc(216)_IgG1_C220S/PVA_/S267K/S364K/E357Q

SEQ ID NO: 314 - protein, 214 aa, Artificial Sequence; identical to SEQ ID NO: 250
  Description of Artificial Sequence: Synthetic polypeptide
  XENP32557 Chain 3 - MESO-C[MSLN]_L1 Light Chain

SEQ ID NO: 315 - protein, 449 aa, Artificial Sequence
  Description of Artificial Sequence: Synthetic polypeptide
  XENP32558 Chain 1 - MESO-C[MSLN]_H1.9_IgG1_pI(-)_Isosteric_ A_/PVA_/S267K/L368D/K370S
QVQLVQSGAEVKKPGASVKVSCKASGYTFTSYWMHWVRQAPGQGLEWMGMIHPNSDNTIYYEKFQGRVTMTVDKSISTAYMELSRLRSDDTAVYYCAIIITPVVPRFDYWGQGTLVTVSSASTKGPSVFPLAPSSKSTSGGTAALGCLVKDYFPEPVTVSWNSGALTSGVHTFPAVLQSSGLYSLSSVVTVPSSSLGTQTYICNVNHKPSDTKVDKKVEPKSCDKTHTCPPCPAPPVAGPSVFLFPPKPKDTLMISRTPEVTCVVVDVKHEDPEVKFNWYVDGVEVHNAKTKPREEEYNSTYRVVSVLTVLHQDWLNGKEYKCKVSNKALPAPIEKTISKAKGQPREPQVYTLPPSREEMTKNQVSLTCDVSGFYPSDIAVEWESDGQPENNYKTTPPVLDSDGSFFLYSKLTVDKSRWEQGDVFSCSVMHEALHNHYTQKSLSLSPGK

SEQ ID NO: 316 - protein, 485 aa, Artificial Sequence; identical to SEQ ID NO: 283
  Description of Artificial Sequence: Synthetic polypeptide
  XENP32558 Chain 2 - MESO-C[MSLN]_H1.9_[CD3]_H1.30_L1.47_scF v(GKPGS)4_Fc(216)_IgG1_C220S/PVA_/S267K/S364K/E357Q

SEQ ID NO: 317 - protein, 214 aa, Artificial Sequence; identical to SEQ ID NO: 250
  Description of Artificial Sequence: Synthetic polypeptide
  XENP32558 Chain 3 - MESO-C[MSLN]_L1 Light Chain

SEQ ID NO: 318 - protein, 449 aa, Artificial Sequence; identical to SEQ ID NO: 288
  Description of Artificial Sequence: Synthetic polypeptide
  XENP32559 Chain 1 - MESO-C[MSLN]_H1_IgG1_pI(-)_Isosteric_A_ /PVA_/S267K/L368D/K370S

SEQ ID NO: 319 - protein, 485 aa, Artificial Sequence; identical to SEQ ID NO: 283
  Description of Artificial Sequence: Synthetic polypeptide
  XENP32559 Chain 2 - MESO-C[MSLN]_H1_[CD3]_H1.30_L1.47_scFv( GKPGS)4_Fc(216)_IgG1_C220S/PVA_/S267K/S364K/E357Q

SEQ ID NO: 320 - protein, 214 aa, Artificial Sequence
  Description of Artificial Sequence: Synthetic polypeptide
  XENP32559 Chain 3 - MESO-C[MSLN]_L1.1 Light Chain
DIVMTQSPDSLAVSLGERATINCKSSHDVGTSVAWYQQKPGQSPKLLIYWASTRHTGVPDRFTGSGSGTDFTLTISSLQAEDVAVYFCQQYSSYPLTFGAGTKLEIKRTVAAPSVFIFPPSDEQLKSGTASVVCLLNNFYPREAKVQWKVDNALQSGNSQESVTEQDSKDSTYSLSSTLTLSKADYEKHKVYACEVTHQGLSSPVTKSFNRGEC

SEQ ID NO: 321 - protein, 449 aa, Artificial Sequence; identical to SEQ ID NO: 288
  Description of Artificial Sequence: Synthetic polypeptide
  XENP32560 Chain 1 - MESO-C[MSLN]_H1_IgG1_pI(-)_Isosteric_A_ /PVA_/S267K/L368D/K370S

SEQ ID NO: 322 - protein, 485 aa, Artificial Sequence; identical to SEQ ID NO: 283
  Description of Artificial Sequence: Synthetic polypeptide
  XENP32560 Chain 2 - MESO-C[MSLN]_H1_[CD3]_H1.30_L1.47_scFv( GKPGS)4_Fc(216)_IgG1_C220S/PVA_/S267K/S364K/E357Q

SEQ ID NO: 323 - protein, 214 aa, Artificial Sequence
  Description of Artificial Sequence: Synthetic polypeptide
  XENP32560 Chain 3 - MESO-C[MSLN]_L1.2 Light Chain
DIVMTQSPDSLAVSLGERATINCKASQDVGTSVAWYQQKPGQSPKLLIYWASTRHTGVPDRFTGSGSGTDFTLTISSLQAEDVAVYFCQQYSSYPLTFGAGTKLEIKRTVAAPSVFIFPPSDEQLKSGTASVVCLLNNFYPREAKVQWKVDNALQSGNSQESVTEQDSKDSTYSLSSTLTLSKADYEKHKVYACEVTHQGLSSPVTKSFNRGEC

SEQ ID NO: 324 - protein, 449 aa, Artificial Sequence; identical to SEQ ID NO: 288
  Description of Artificial Sequence: Synthetic polypeptide
  XENP32561 Chain 1 - MESO-C[MSLN]_H1_IgG1_pI(-)_Isosteric_A_ /PVA_/S267K/L368D/K370S

SEQ ID NO: 325 - protein, 485 aa, Artificial Sequence; identical to SEQ ID NO: 283
  Description of Artificial Sequence: Synthetic polypeptide
  XENP32561 Chain 2 - MESO-C[MSLN]_H1_[CD3]_H1.30_L1.47_scFv( GKPGS)4_Fc(216)_IgG1_C220S/PVA_/S267K/S364K/E357Q

SEQ ID NO: 326 - protein, 214 aa, Artificial Sequence
  Description of Artificial Sequence: Synthetic polypeptide
  XENP32561 Chain 3 - MESO-C[MSLN]_L1.3 Light Chain
DIVMTQSPDSLAVSLGERATINCKASHSVGTSVAWYQQKPGQSPKLLIYWASTRHTGVPDRFTGSGSGTDFTLTISSLQAEDVAVYFCQQYSSYPLTFGAGTKLEIKRTVAAPSVFIFPPSDEQLKSGTASVVCLLNNFYPREAKVQWKVDNALQSGNSQESVTEQDSKDSTYSLSSTLTLSKADYEKHKVYACEVTHQGLSSPVTKSFNRGEC

SEQ ID NO: 327 - protein, 449 aa, Artificial Sequence; identical to SEQ ID NO: 288
  Description of Artificial Sequence: Synthetic polypeptide
  XENP32562 Chain 1 - MESO-C[MSLN]_H1_IgG1_pI(-)_Isosteric_A_ /PVA_/S267K/L368D/K370S

SEQ ID NO: 328 - protein, 485 aa, Artificial Sequence; identical to SEQ ID NO: 283
  Description of Artificial Sequence: Synthetic polypeptide
  XENP32562 Chain 2 - MESO-C[MSLN]_H1_[CD3]_H1.30_L1.47_scFv( GKPGS)4_Fc(216)_IgG1_C220S/PVA_/S267K/S364K/E357Q

SEQ ID NO: 329 - protein, 214 aa, Artificial Sequence
  Description of Artificial Sequence: Synthetic polypeptide
  XENP32562 Chain 3 - MESO-C[MSLN]_L1.4 Light Chain
DIVMTQSPDSLAVSLGERATINCKASHDVLTSVAWYQQKPGQSPKLLIYWASTRHTGVPDRFTGSGSGTDFTLTISSLQAEDVAVYFCQQYSSYPLTFGAGTKLEIKRTVAAPSVFIFPPSDEQLKSGTASVVCLLNNFYPREAKVQWKVDNALQSGNSQESVTEQDSKDSTYSLSSTLTLSKADYEKHKVYACEVTHQGLSSPVTKSFNRGEC

SEQ ID NO: 330 - protein, 449 aa, Artificial Sequence; identical to SEQ ID NO: 288
  Description of Artificial Sequence: Synthetic polypeptide
  XENP32563 Chain 1 - MESO-C[MSLN]_H1_IgG1_pI(-)_Isosteric_A_ /PVA_/S267K/L368D/K370S

SEQ ID NO: 331 - protein, 485 aa, Artificial Sequence; identical to SEQ ID NO: 283
  Description of Artificial Sequence: Synthetic polypeptide
  XENP32563 Chain 2 - MESO-C[MSLN]_H1_[CD3]_H1.30_L1.47_scFv( GKPGS)4_Fc(216)_IgG1_C220S/PVA_/S267K/S364K/E357Q

SEQ ID NO: 332 - protein, 214 aa, Artificial Sequence
  Description of Artificial Sequence: Synthetic polypeptide
  XENP32563 Chain 3 - MESO-C[MSLN]_L1.5 Light Chain
DIVMTQSPDSLAVSLGERATINCKASHDVGTYVAWYQQKPGQSPKLLIYWASTRHTGVPDRFTGSGSGTDFTLTISSLQAEDVAVYFCQQYSSYPLTFGAGTKLEIKRTVAAPSVFIFPPSDEQLKSGTASVVCLLNNFYPREAKVQWKVDNALQSGNSQESVTEQDSKDSTYSLSSTLTLSKADYEKHKVYACEVTHQGLSSPVTKSFNRGEC

SEQ ID NO: 333 - protein, 449 aa, Artificial Sequence; identical to SEQ ID NO: 288
  Description of Artificial Sequence: Synthetic polypeptide
  XENP32564 Chain 1 - MESO-C[MSLN]_H1_IgG1_pI(-)_Isosteric_A_ /PVA_/S267K/L368D/K370S

SEQ ID NO: 334 - protein, 485 aa, Artificial Sequence; identical to SEQ ID NO: 283
  Description of Artificial Sequence: Synthetic polypeptide
  XENP32564 Chain 2 - MESO-C[MSLN]_H1_[CD3]_H1.30_L1.47_scFv( GKPGS)4_Fc(216)_IgG1_C220S/PVA_/S267K/S364K/E357Q

SEQ ID NO: 335 - protein, 214 aa, Artificial Sequence
  Description of Artificial Sequence: Synthetic polypeptide
  XENP32564 Chain 3 - MESO-C[MSLN]_L1.6 Light Chain
DIVMTQSPDSLAVSLGERATINCKASHDVGTSLAWYQQKPGQSPKLLIYWASTRHTGVPDRFTGSGSGTDFTLTISSLQAEDVAVYFCQQYSSYPLTFGAGTKLEIKRTVAAPSVFIFPPSDEQLKSGTASVVCLLNNFYPREAKVQWKVDNALQSGNSQESVTEQDSKDSTYSLSSTLTLSKADYEKHKVYACEVTHQGLSSPVTKSFNRGEC

SEQ ID NO: 336 - protein, 449 aa, Artificial Sequence; identical to SEQ ID NO: 288
  Description of Artificial Sequence: Synthetic polypeptide
  XENP32565 Chain 1 - MESO-C[MSLN]_H1_IgG1_pI(-)_Isosteric_A_ /PVA_/S267K/L368D/K370S

SEQ ID NO: 337 - protein, 485 aa, Artificial Sequence; identical to SEQ ID NO: 283
  Description of Artificial Sequence: Synthetic polypeptide
  XENP32565 Chain 2 - MESO-C[MSLN]_H1_[CD3]_H1.30_L1.47_scFv( GKPGS)4_Fc(216)_IgG1_C220S/PVA_/S267K/S364K/E357Q

SEQ ID NO: 338 - protein, 214 aa, Artificial Sequence
  Description of Artificial Sequence: Synthetic polypeptide
  XENP32565 Chain 3 - MESO-C[MSLN]_L1.7 Light Chain
DIVMTQSPDSLAVSLGERATINCKASHDVGTSVAWYQQKPGQSPKLLIYWASTRETGVPDRFTGSGSGTDFTLTISSLQAEDVAVYFCQQYSSYPLTFGAGTKLEIKRTVAAPSVFIFPPSDEQLKSGTASVVCLLNNFYPREAKVQWKVDNALQSGNSQESVTEQDSKDSTYSLSSTLTLSKADYEKHKVYACEVTHQGLSSPVTKSFNRGEC

SEQ ID NO: 339 - protein, 449 aa, Artificial Sequence; identical to SEQ ID NO: 288
  Description of Artificial Sequence: Synthetic polypeptide
  XENP32566 Chain 1 - MESO-C[MSLN]_H1_IgG1_pI(-)_Isosteric_A_ /PVA_/S267K/L368D/K370S

SEQ ID NO: 340 - protein, 485 aa, Artificial Sequence; identical to SEQ ID NO: 283
  Description of Artificial Sequence: Synthetic polypeptide
  XENP32566 Chain 2 - MESO-C[MSLN]_H1_[CD3]_H1.30_L1.47_scFv( GKPGS)4_Fc(216)_IgG1_C220S/PVA_/S267K/S364K/E357Q

SEQ ID NO: 341 - protein, 214 aa, Artificial Sequence
  Description of Artificial Sequence: Synthetic polypeptide
  XENP32566 Chain 3 - MESO-C[MSLN]_L1.8 Light Chain
DIVMTQSPDSLAVSLGERATINCKASHDVGTSVAWYQQKPGQSPKLLIYWASTRHSGVPDRFTGSGSGTDFTLTISSLQAEDVAVYFCQQYSSYPLTFGAGTKLEIKRTVAAPSVFIFPPSDEQLKSGTASVVCLLNNFYPREAKVQWKVDNALQSGNSQESVTEQDSKDSTYSLSSTLTLSKADYEKHKVYACEVTHQGLSSPVTKSFNRGEC

SEQ ID NO: 342 - protein, 449 aa, Artificial Sequence; identical to SEQ ID NO: 288
  Description of Artificial Sequence: Synthetic polypeptide
  XENP32567 Chain 1 - MESO-C[MSLN]_H1_IgG1_pI(-)_Isosteric_A_ /PVA_/S267K/L368D/K370S

SEQ ID NO: 343 - protein, 485 aa, Artificial Sequence; identical to SEQ ID NO: 283
  Description of Artificial Sequence: Synthetic polypeptide
  XENP32567 Chain 2 - MESO-C[MSLN]_H1_[CD3]_H1.30_L1.47_scFv( GKPGS)4_Fc(216)_IgG1_C220S/PVA_/S267K/S364K/E357Q

SEQ ID NO: 344 - protein, 214 aa, Artificial Sequence
  Description of Artificial Sequence: Synthetic polypeptide
  XENP32567 Chain 3 - MESO-C[MSLN]_L1.9 Light Chain
DIVMTQSPDSLAVSLGERATINCKASHDVGTSVAWYQQKPGQSPKLLIYWASTRHTGVPDRFTGSGSGTDFTLTISSLQAEDVAVYFCQQYYSYPLTFGAGTKLEIKRTVAAPSVFIFPPSDEQLKSGTASVVCLLNNFYPREAKVQWKVDNALQSGNSQESVTEQDSKDSTYSLSSTLTLSKADYEKHKVYACEVTHQGLSSPVTKSFNRGEC

SEQ ID NO: 345 - protein, 449 aa, Artificial Sequence; identical to SEQ ID NO: 288
  Description of Artificial Sequence: Synthetic polypeptide
  XENP32568 Chain 1 - MESO-C[MSLN]_H1_IgG1_pI(-)_Isosteric_A_ /PVA_/S267K/L368D/K370S

SEQ ID NO: 346 - protein, 485 aa, Artificial Sequence; identical to SEQ ID NO: 283
  Description of Artificial Sequence: Synthetic polypeptide
  XENP32568 Chain 2 - MESO-C[MSLN]_H1_[CD3]_H1.30_L1.47_scFv( GKPGS)4_Fc(216)_IgG1_C220S/PVA_/S267K/S364K/E357Q

SEQ ID NO: 347 - protein, 214 aa, Artificial Sequence
  Description of Artificial Sequence: Synthetic polypeptide
  XENP32568 Chain 3 - MESO-C[MSLN]_L1.10 Light Chain
DIVMTQSPDSLAVSLGERATINCKASHDVGTSVAWYQQKPGQSPKLLIYWASTRHTGVPDRFTGSGSGTDFTLTISSLQAEDVAVYFCQQYSSTPLTFGAGTKLEIKRTVAAPSVFIFPPSDEQLKSGTASVVCLLNNFYPREAKVQWKVDNALQSGNSQESVTEQDSKDSTYSLSSTLTLSKADYEKHKVYACEVTHQGLSSPVTKSFNRGEC

SEQ ID NO: 348 - protein, 449 aa, Artificial Sequence; identical to SEQ ID NO: 303
  Description of Artificial Sequence: Synthetic polypeptide
  XENP32569 Chain 1 - MESO-C[MSLN]_H1.5_IgG1_pI(-)_Isosteric_ A_/PVA_/S267K/L368D/K370S

SEQ ID NO: 349 - protein, 485 aa, Artificial Sequence; identical to SEQ ID NO: 283
  Description of Artificial Sequence: Synthetic polypeptide
  XENP32569 Chain 2 - MESO-C[MSLN]_H1.5_[CD3]_H1.30_L1.47_scF v(GKPGS)4_Fc(216)_IgG1_C220S/PVA_/S267K/S364K/E357Q

SEQ ID NO: 350 - protein, 214 aa, Artificial Sequence; identical to SEQ ID NO: 326
  Description of Artificial Sequence: Synthetic polypeptide
  XENP32569 Chain 3 - MESO-C[MSLN]_L1.3 Light Chain

SEQ ID NO: 351 - protein, 449 aa, Artificial Sequence; identical to SEQ ID NO: 306
  Description of Artificial Sequence: Synthetic polypeptide
  XENP32570 Chain 1 - MESO-C[MSLN]_H1.6_IgG1_pI(-)_Isosteric_ A_/PVA_/S267K/L368D/K370S

SEQ ID NO: 352 - protein, 485 aa, Artificial Sequence; identical to SEQ ID NO: 283
  Description of Artificial Sequence: Synthetic polypeptide
  XENP32570 Chain 2 - MESO-C[MSLN]_H1.6_[CD3]_H1.30_L1.47_scF v(GKPGS)4_Fc(216)_IgG1_C220S/PVA_/S267K/S364K/E357Q

SEQ ID NO: 353 - protein, 214 aa, Artificial Sequence; identical to SEQ ID NO: 326
  Description of Artificial Sequence: Synthetic polypeptide
  XENP32570 Chain 3 - MESO-C[MSLN]_L1.3 Light Chain

SEQ ID NO: 354 - protein, 449 aa, Artificial Sequence
  Description of Artificial Sequence: Synthetic polypeptide
  XENP32937 Chain 1 - MESO-C[MSLN]_H1.12_IgG1_pI(-)_Isosteric _A_/PVA_/S267K/L368D/K370S
QVQLVQSGAEVKKPGASVKVSCKASGYTFTSYWMHWVRQAPGQGLEWMGMIHPNSDNTIYYQKFQGRVTMTVDKSISTAYMELSRLRSDDTAVYYCAIIITPVVPKFDYWGQGTLVTVSSASTKGPSVFPLAPSSKSTSGGTAALGCLVKDYFPEPVTVSWNSGALTSGVHTFPAVLQSSGLYSLSSVVTVPSSSLGTQTYICNVNHKPSDTKVDKKVEPKSCDKTHTCPPCPAPPVAGPSVFLFPPKPKDTLMISRTPEVTCVVVDVKHEDPEVKFNWYVDGVEVHNAKTKPREEEYNSTYRVVSVLTVLHQDWLNGKEYKCKVSNKALPAPIEKTISKAKGQPREPQVYTLPPSREEMTKNQVSLTCDVSGFYPSDIAVEWESDGQPENNYKTTPPVLDSDGSFFLYSKLTVDKSRWEQGDVFSCSVMHEALHNHYTQKSLSLSPGK

SEQ ID NO: 355 - protein, 485 aa, Artificial Sequence; identical to SEQ ID NO: 283
  Description of Artificial Sequence: Synthetic polypeptide
  XENP32937 Chain 2 - MESO-C[MSLN]_H1.12_[CD3]_H1.30_L1.47_sc Fv(GKPGS)4-IgG1_pI(-)_Isosteric_A_/PVA_/S267K/L368D/K370S-F c(216)_IgG1_C220S/PVA_/S267K/S364K/E357Q

SEQ ID NO: 356 - protein, 214 aa, Artificial Sequence; identical to SEQ ID NO: 344
  Description of Artificial Sequence: Synthetic polypeptide
  XENP32937 Chain 3 - MESO-C[MSLN]_L1.9 Light Chain

SEQ ID NO: 357 - protein, 449 aa, Artificial Sequence
  Description of Artificial Sequence: Synthetic polypeptide
  XENP32938 Chain 1 - MESO-C[MSLN]_H1.13_IgG1_pI(-)_Isosteric _A_/PVA_/S267K/L368D/K370S
QVQLVQSGAEVKKPGASVKVSCKASGYTFTSYWMHWVRQAPGQGLEWMGMIHPNSDNTIYYYKFQGRVTMTVDKSISTAYMELSRLRSDDTAVYYCAIIITPVVPKFDYWGQGTLVTVSSASTKGPSVFPLAPSSKSTSGGTAALGCLVKDYFPEPVTVSWNSGALTSGVHTFPAVLQSSGLYSLSSVVTVPSSSLGTQTYICNVNHKPSDTKVDKKVEPKSCDKTHTCPPCPAPPVAGPSVFLFPPKPKDTLMISRTPEVTCVVVDVKHEDPEVKFNWYVDGVEVHNAKTKPREEEYNSTYRVVSVLTVLHQDWLNGKEYKCKVSNKALPAPIEKTISKAKGQPREPQVYTLPPSREEMTKNQVSLTCDVSGFYPSDIAVEWESDGQPENNYKTTPPVLDSDGSFFLYSKLTVDKSRWEQGDVFSCSVMHEALHNHYTQKSLSLSPGK

SEQ ID NO: 358 - protein, 485 aa, Artificial Sequence; identical to SEQ ID NO: 283
  Description of Artificial Sequence: Synthetic polypeptide
  XENP32938 Chain 2 - MESO-C[MSLN]_H1.13_[CD3]_H1.30_L1.47_sc Fv(GKPGS)4-IgG1_pI(-)_Isosteric_A_/PVA_/S267K/L368D/K370S-F c(216)_IgG1_C220S/PVA_/S267K/S364K/E357Q

SEQ ID NO: 359 - protein, 214 aa, Artificial Sequence; identical to SEQ ID NO: 344
  Description of Artificial Sequence: Synthetic polypeptide
  XENP32938 Chain 3 - MESO-C[MSLN]_L1.9 Light Chain

SEQ ID NO: 360 - protein, 449 aa, Artificial Sequence; identical to SEQ ID NO: 297
  Description of Artificial Sequence: Synthetic polypeptide
  XENP32939 Chain 1 - MESO-C[MSLN]_H1.3_IgG1_pI(-)_Isosteric_ A_/PVA_/S267K/L368D/K370S

SEQ ID NO: 361 - protein, 485 aa, Artificial Sequence; identical to SEQ ID NO: 283
  Description of Artificial Sequence: Synthetic polypeptide
  XENP32939 Chain 2 - MESO-C[MSLN]_H1.3_[CD3]_H1.30_L1.47_scF v(GKPGS)4-IgG1_pI(-)_Isosteric_A_/PVA_/S267K/L368D/K370S-Fc (216)_IgG1_C220S/PVA_/S267K/S364K/E357Q

SEQ ID NO: 362 - protein, 214 aa, Artificial Sequence
  Description of Artificial Sequence: Synthetic polypeptide
  XENP32939 Chain 3 - MESO-C[MSLN]_L1.13 Light Chain
DIVMTQSPDSLAVSLGERATINCKASHDVGQSVAWYQQKPGQSPKLLIYWASTRHTGVPDRFTGSGSGTDFTLTISSLQAEDVAVYFCQQYSSYPLTFGAGTKLEIKRTVAAPSVFIFPPSDEQLKSGTASVVCLLNNFYPREAKVQWKVDNALQSGNSQESVTEQDSKDSTYSLSSTLTLSKADYEKHKVYACEVTHQGLSSPVTKSFNRGEC

SEQ ID NO: 363 - protein, 449 aa, Artificial Sequence; identical to SEQ ID NO: 297
  Description of Artificial Sequence: Synthetic polypeptide
  XENP32940 Chain 1 - MESO-C[MSLN]_H1.3_IgG1_pI(-)_Isosteric_ A_/PVA_/S267K/L368D/K370S

SEQ ID NO: 364 - protein, 485 aa, Artificial Sequence; identical to SEQ ID NO: 283
  Description of Artificial Sequence: Synthetic polypeptide
  XENP32940 Chain 2 - MESO-C[MSLN]_H1.3_[CD3]_H1.30_L1.47_scF v(GKPGS)4-IgG1_pI(-)_Isosteric_A_/PVA_/S267K/L368D/K370S-Fc (216)_IgG1_C220S/PVA_/S267K/S364K/E357Q

SEQ ID NO: 365 - protein, 214 aa, Artificial Sequence
  Description of Artificial Sequence: Synthetic polypeptide
  XENP32940 Chain 3 - MESO-C[MSLN]_L1.14 Light Chain
DIVMTQSPDSLAVSLGERATINCKASHDVGTSVAWYQQKPGQSPKLLIYWASTRHTGVPDRFTGSGSGTDFTLTISSLQAEDVAVYFCQQYSSFPLTFGAGTKLEIKRTVAAPSVFIFPPSDEQLKSGTASVVCLLNNFYPREAKVQWKVDNALQSGNSQESVTEQDSKDSTYSLSSTLTLSKADYEKHKVYACEVTHQGLSSPVTKSFNRGEC

SEQ ID NO: 366 - protein, 449 aa, Artificial Sequence; identical to SEQ ID NO: 297
  Description of Artificial Sequence: Synthetic polypeptide
  XENP32941 Chain 1 - MESO-C[MSLN]_H1.3_IgG1_pI(-)_Isosteric_ A_/PVA_/S267K/L368D/K370S

SEQ ID NO: 367 - protein, 485 aa, Artificial Sequence; identical to SEQ ID NO: 283
  Description of Artificial Sequence: Synthetic polypeptide
  XENP32941 Chain 2 - MESO-C[MSLN]_H1.3_[CD3]_H1.30_L1.47_scF v(GKPGS)4-IgG1_pI(-)_Isosteric_A_/PVA_/S267K/L368D/K370S-Fc (216)_IgG1_C220S/PVA_/S267K/S364K/E357Q

SEQ ID NO: 368 - protein, 214 aa, Artificial Sequence
  Description of Artificial Sequence: Synthetic polypeptide
  XENP32941 Chain 3 - MESO-C[MSLN]_L1.15 Light Chain
DIVMTQSPDSLAVSLGERATINCKASHDVGTSVAWYQQKPGQSPKLLIYWASTRHTGVPDRFTGSGSGTDFTLTISSLQAEDVAVYFCQQYSSLPLTFGAGTKLEIKRTVAAPSVFIFPPSDEQLKSGTASVVCLLNNFYPREAKVQWKVDNALQSGNSQESVTEQDSKDSTYSLSSTLTLSKADYEKHKVYACEVTHQGLSSPVTKSFNRGEC

SEQ ID NO: 369 - protein, 449 aa, Artificial Sequence; identical to SEQ ID NO: 297
  Description of Artificial Sequence: Synthetic polypeptide
  XENP32942 Chain 1 - MESO-C[MSLN]_H1.3_IgG1_pI(-)_Isosteric_ A_/PVA_/S267K/L368D/K370S

SEQ ID NO: 370 - protein, 485 aa, Artificial Sequence; identical to SEQ ID NO: 283
  Description of Artificial Sequence: Synthetic polypeptide
  XENP32942 Chain 2 - MESO-C[MSLN]_H1.3_[CD3]_H1.30_L1.47_scF v(GKPGS)4_Fc(216)_IgG1_C220S/PVA_/S267K/S364K/E357Q

SEQ ID NO: 371 - protein, 214 aa, Artificial Sequence
  Description of Artificial Sequence: Synthetic polypeptide
  XENP32942 Chain 3 - MESO-C[MSLN]_L1.16 Light Chain
DIVMTQSPDSLAVSLGERATINCKASHDVGTSVAWYQQKPGQSPKLLIYWASTRHTGVPDRFTGSGSGTDFTLTISSLQAEDVAVYFCQQYSSVPLTFGAGTKLEIKRTVAAPSVFIFPPSDEQLKSGTASVVCLLNNFYPREAKVQWKVDNALQSGNSQESVTEQDSKDSTYSLSSTLTLSKADYEKHKVYACEVTHQGLSSPVTKSFNRGEC

SEQ ID NO: 372 - protein, 449 aa, Artificial Sequence; identical to SEQ ID NO: 297
  Description of Artificial Sequence: Synthetic polypeptide
  XENP32943 Chain 1 - MESO-C[MSLN]_H1.3_IgG1_pI(-)_Isosteric_ A_/PVA_/S267K/L368D/K370S

SEQ ID NO: 373 - protein, 485 aa, Artificial Sequence; identical to SEQ ID NO: 283
  Description of Artificial Sequence: Synthetic polypeptide
  XENP32943 Chain 2 - MESO-C[MSLN]_H1.3_[CD3]_H1.30_L1.47_scF v(GKPGS)4-IgG1_pI(-)_Isosteric_A_/PVA_/S267K/L368D/K370S-Fc (216)_IgG1_C220S/PVA_/S267K/S364K/E357Q

SEQ ID NO: 374 - protein, 214 aa, Artificial Sequence
  Description of Artificial Sequence: Synthetic polypeptide
  XENP32943 Chain 3 - MESO-C[MSLN]_L1.17 Light Chain
DIVMTQSPDSLAVSLGERATINCKASHDVGTSVAWYQQKPGQSPKLLIYWASTRHTGVPDRFTGSGSGTDFTLTISSLQAEDVAVYFCQQYSSIPLTFGAGTKLEIKRTVAAPSVFIFPPSDEQLKSGTASVVCLLNNFYPREAKVQWKVDNALQSGNSQESVTEQDSKDSTYSLSSTLTLSKADYEKHKVYACEVTHQGLSSPVTKSFNRGEC

SEQ ID NO: 375 - protein, 449 aa, Artificial Sequence; identical to SEQ ID NO: 297
  Description of Artificial Sequence: Synthetic polypeptide
  XENP32944 Chain 1 - MESO-C[MSLN]_H1.3_IgG1_pI(-)_Isosteric_ A_/PVA_/S267K/L368D/K370S

SEQ ID NO: 376 - protein, 485 aa, Artificial Sequence; identical to SEQ ID NO: 283
  Description of Artificial Sequence: Synthetic polypeptide
  XENP32944 Chain 2 - MESO-C[MSLN]_H1.3_[CD3]_H1.30_L1.47_scF v(GKPGS)4-IgG1_pI(-)_Isosteric_A_/PVA_/S267K/L368D/K370S-Fc (216)_IgG1_C220S/PVA_/S267K/S364K/E357Q

SEQ ID NO: 377 - protein, 214 aa, Artificial Sequence
  Description of Artificial Sequence: Synthetic polypeptide
  XENP32944 Chain 3 - MESO-C[MSLN]_L1.18 Light Chain
DIVMTQSPDSLAVSLGERATINCKASHDVGTSVAWYQQKPGQSPKLLIYWASTRHTGVPDRFTGSGSGTDFTLTISSLQAEDVAVYFCQQYSSHPLTFGAGTKLEIKRTVAAPSVFIFPPSDEQLKSGTASVVCLLNNFYPREAKVQWKVDNALQSGNSQESVTEQDSKDSTYSLSSTLTLSKADYEKHKVYACEVTHQGLSSPVTKSFNRGEC

SEQ ID NO: 378 - protein, 449 aa, Artificial Sequence; identical to SEQ ID NO: 297
  Description of Artificial Sequence: Synthetic polypeptide
  XENP32945 Chain 1 - MESO-C[MSLN]_H1.3_IgG1_pI(-)_Isosteric_ A_/PVA_/S267K/L368D/K370S

SEQ ID NO: 379 - protein, 485 aa, Artificial Sequence; identical to SEQ ID NO: 283
  Description of Artificial Sequence: Synthetic polypeptide
  XENP32945 Chain 2 - MESO-C[MSLN]_H1.3_[CD3]_H1.30_L1.47_scF v(GKPGS)4-IgG1_pI(-)_Isosteric_A_/PVA_/S267K/L368D/K370S-Fc (216)_IgG1_C220S/PVA_/S267K/S364K/E357Q

SEQ ID NO: 380 - protein, 214 aa, Artificial Sequence; identical to SEQ ID NO: 344
  Description of Artificial Sequence: Synthetic polypeptide
  XENP32945 Chain 3 - MESO-C[MSLN]_L1.9 Light Chain

SEQ ID NO: 381 - protein, 449 aa, Artificial Sequence; identical to SEQ ID NO: 297
  Description of Artificial Sequence: Synthetic polypeptide
  XENP32946 Chain 1 - MESO-C[MSLN]_H1.3_IgG1_pI(-)_Isosteric_ A_/PVA_/S267K/L368D/K370S

SEQ ID NO: 382 - protein, 485 aa, Artificial Sequence; identical to SEQ ID NO: 283
  Description of Artificial Sequence: Synthetic polypeptide
  XENP32946 Chain 2 - MESO-C[MSLN]_H1.3_[CD3]_H1.30_L1.47_scF v(GKPGS)4-IgG1_pI(-)_Isosteric_A_/PVA_/S267K/L368D/K370S-Fc (216)_IgG1_C220S/PVA_/S267K/S364K/E357Q

SEQ ID NO: 383 - protein, 214 aa, Artificial Sequence; identical to SEQ ID NO: 332
  Description of Artificial Sequence: Synthetic polypeptide
  XENP32946 Chain 3 - MESO-C[MSLN]_L1.5 Light Chain

SEQ ID NO: 384 - protein, 485 aa, Artificial Sequence; identical to SEQ ID NO: 283
  Description of Artificial Sequence: Synthetic polypeptide
  XENP33888 Chain 1 - MESO-C[MSLN]_H1_IgG1_pI(-)_Isosteric_A_ /PVA_/S267K/L368D/K370S

SEQ ID NO: 385 - protein, 449 aa, Artificial Sequence; identical to SEQ ID NO: 288
  Description of Artificial Sequence: Synthetic polypeptide
  XENP33888 Chain 2 - [CD3]_H1.30_L1.47_scFv(GKPGS)4_Fc(216)_ IgG1_C220S/PVA_/S267K/S364K/E357Q

SEQ ID NO: 386 - protein, 214 aa, Artificial Sequence
  Description of Artificial Sequence: Synthetic polypeptide
  XENP33888 Chain 3 - MESO-C[MSLN]_L1.20 Light Chain
DIVMTQSPDSLAVSLGERATINCKASHDVGTSVAWYQQKPGQSPKLLIYWASTRHTGVPDRFTGSGSGTDFTLTISSLQAEDVAVYFCQQYYSFPLTFGAGTKLEIKRTVAAPSVFIFPPSDEQLKSGTASVVCLLNNFYPREAKVQWKVDNALQSGNSQESVTEQDSKDSTYSLSSTLTLSKADYEKHKVYACEVTHQGLSSPVTKSFNRGEC

SEQ ID NO: 387 - protein, 485 aa, Artificial Sequence; identical to SEQ ID NO: 283
  Description of Artificial Sequence: Synthetic polypeptide
  XENP33889 Chain 1 - MESO-C[MSLN]_H1.12_IgG1_pI(-)_Isosteric _A_/PVA_/S267K/L368D/K370S

SEQ ID NO: 388 - protein, 449 aa, Artificial Sequence; identical to SEQ ID NO: 354
  Description of Artificial Sequence: Synthetic polypeptide
  XENP33889 Chain 2 - [CD3]_H1.30_L1.47_scFv(GKPGS)4_Fc(216)_ IgG1_C220S/PVA_/S267K/S364K/E357Q

SEQ ID NO: 389 - protein, 214 aa, Artificial Sequence; identical to SEQ ID NO: 386
  Description of Artificial Sequence: Synthetic polypeptide
  XENP33889 Chain 3 - MESO-C[MSLN]_L1.20 Light Chain

SEQ ID NO: 390 - protein, 453 aa, Artificial Sequence; identical to SEQ ID NO: 229
  Description of Artificial Sequence: Synthetic polypeptide
  XENP30764 Chain 1 - MESO-A[MSLN]_H1.1_L1_Fab_IgG1_pI(-)_Iso steric_A_/PVA_/S267K/L368D/K370S

SEQ ID NO: 391 - protein, 485 aa, Artificial Sequence
  Description of Artificial Sequence: Synthetic polypeptide
  XENP30764 Chain 2 - [CD3]_H1.32_L1.47_scFv(GKPGS)4_Fc(216)_ IgG1_C220S/PVA_/S267K/S364K/E357Q
EVQLVESGGGLVQPGGSLRLSCAASGFTFSTYAMNWVRQAPGKGLEWVGRIRSKANNYATYYADSVKGRFTISRDDSKNTLYLQMNSLRAEDTAVYYCVRHGNFGDSYVSWFAYWGQGTLVTVSSGKPGSGKPGSGKPGSGKPGSQAVVTQEPSLTVSPGGTVTLTCGSSTGAVTTSNYANWVQQKPGKSPRGLIGGTNKRAPGVPARFSGSLLGGKAALTISGAQPEDEADYYCALWYSNHWVFGGGTKLTVLEPKSSDKTHTCPPCPAPPVAGPSVFLFPPKPKDTLMISRTPEVTCVVVDVKHEDPEVKFNWYVDGVEVHNAKTKPREEQYNSTYRVVSVLTVLHQDWLNGKEYKCKVSNKALPAPIEKTISKAKGQPREPQVYTLPPSREQMTKNQVKLTCLVKGFYPSDIAVEWESNGQPENNYKTTPPVLDSDGSFFLYSKLTVDKSRWQQGNVFSCSVMHEALHNHYTQKSLSLSPGK

SEQ ID NO: 392 - protein, 213 aa, Artificial Sequence; identical to SEQ ID NO: 226
  Description of Artificial Sequence: Synthetic polypeptide
  XENP30764 Chain 3 - MESO-A[MSLN]_L1 Light Chain

SEQ ID NO: 393 - protein, 452 aa, Artificial Sequence; identical to SEQ ID NO: 285
  Description of Artificial Sequence: Synthetic polypeptide
  XENP30765 Chain 1 - MESO-B[MSLN]_H0L0_Fab_IgG1_pI(-)_Isoste ric_A_/PVA_/S267K/L368D/K370S

SEQ ID NO: 394 - protein, 485 aa, Artificial Sequence; identical to SEQ ID NO: 391
  Description of Artificial Sequence: Synthetic polypeptide
  XENP30765 Chain 2 - [CD3]_H1.32_L1.47_scFv(GKPGS)4_Fc(216)_ IgG1_C220S/PVA_/S267K/S364K/E357Q

SEQ ID NO: 395 - protein, 221 aa, Artificial Sequence; identical to SEQ ID NO: 240
  Description of Artificial Sequence: Synthetic polypeptide
  XENP30765 Chain 3 - MESO-B[MSLN]_L0 Light Chain

SEQ ID NO: 396 - protein, 449 aa, Artificial Sequence; identical to SEQ ID NO: 288
  Description of Artificial Sequence: Synthetic polypeptide
  XENP31701 Chain 1 - MESO-C[MSLN]_H1_IgG1_pI(-)_Isosteric_A_ /PVA_/S267K/L368D/K370S

SEQ ID NO: 397 - protein, 485 aa, Artificial Sequence; identical to SEQ ID NO: 391
  Description of Artificial Sequence: Synthetic polypeptide
  XENP31701 Chain 2 - [CD3]_H1.32_L1.47_scFv(GKPGS)4_Fc(216)_ IgG1_C220S/PVA_/S267K/S364K/E357Q

SEQ ID NO: 398 - protein, 214 aa, Artificial Sequence; identical to SEQ ID NO: 250
  Description of Artificial Sequence: Synthetic polypeptide
  XENP31701 Chain 3 - MESO-C[MSLN]_L1 Light Chain

SEQ ID NO: 399 - protein, 449 aa, Artificial Sequence
  Description of Artificial Sequence: Synthetic polypeptide
  XENP33969 Chain 1 - MESO-C[MSLN]_H1.14_IgG1_pI(-)_Isosteric _A_PVA_/S267K/L368D/K370S
QVQLVQSGAEVKKPGASVKVSCKASGYTFTSYWMHWVRQAPGQGLEWMGWIHPQSDNTIYYEKFQGRVTMTVDKSISTAYMELSRLRSDDTAVYYCAIIITPVVPKFDYWGQGTLVTVSSASTKGPSVFPLAPSSKSTSGGTAALGCLVKDYFPEPVTVSWNSGALTSGVHTFPAVLQSSGLYSLSSVVTVPSSSLGTQTYICNVNHKPSDTKVDKKVEPKSCDKTHTCPPCPAPPVAGPSVFLFPPKPKDTLMISRTPEVTCVVVDVKHEDPEVKFNWYVDGVEVHNAKTKPREEEYNSTYRVVSVLTVLHQDWLNGKEYKCKVSNKALPAPIEKTISKAKGQPREPQVYTLPPSREEMTKNQVSLTCDVSGFYPSDIAVEWESDGQPENNYKTTPPVLDSDGSFFLYSKLTVDKSRWEQGDVFSCSVMHEALHNHYTQKSLSLSPGK

SEQ ID NO: 400 - protein, 485 aa, Artificial Sequence
  Description of Artificial Sequence: Synthetic polypeptide
  XENP33969 Chain 2 - [CD3]_L1.47_H1.32_scFv(GKPGS)4_Fc(216)_ IgG1_C220S/PVA_/S267K/S364K/E357Q
QAVVTQEPSLTVSPGGTVTLTCGSSTGAVTTSNYANWVQQKPGKSPRGLIGGTNKRAPGVPARFSGSLLGGKAALTISGAQPEDEADYYCALWYSNHWVFGGGTKLTVLGKPGSGKPGSGKPGSGKPGSEVQLVESGGGLVQPGGSLRLSCAASGFTFSTYAMNWVRQAPGKGLEWVGRIRSKANNYATYYADSVKGRFTISRDDSKNTLYLQMNSLRAEDTAVYYCVRHGNFGDSYVSWFAYWGQGTLVTVSSEPKSSDKTHTCPPCPAPPVAGPSVFLFPPKPKDTLMISRTPEVTCVVVDVKHEDPEVKFNWYVDGVEVHNAKTKPREEQYNSTYRVVSVLTVLHQDWLNGKEYKCKVSNKALPAPIEKTISKAKGQPREPQVYTLPPSREQMTKNQVKLTCLVKGFYPSDIAVEWESNGQPENNYKTTPPVLDSDGSFFLYSKLTVDKSRWQQGNVFSCSVMHEALHNHYTQKSLSLSPGK

SEQ ID NO: 401 - protein, 214 aa, Artificial Sequence; identical to SEQ ID NO: 365
  Description of Artificial Sequence: Synthetic polypeptide
  XENP33969 Chain 3 - MESO-C[MSLN]_L1.14 Light Chain

SEQ ID NO: 402 - protein, 449 aa, Artificial Sequence
  Description of Artificial Sequence: Synthetic polypeptide
  XENP33971 Chain 1 - MESO-C[MSLN]_H1.15_IgG1_pI(-)_Isosteric _A_PVA_/S267K/L368D/K370S
QVQLVQSGAEVKKPGASVKVSCKASGYTFTSYWMHWVRQAPGQGLEWMGWIHPNSDNTIYYEKFQGRVTMTVDKSISTAYMELSRLRSDDTAVYYCARIITPVVPKFDYWGQGTLVTVSSASTKGPSVFPLAPSSKSTSGGTAALGCLVKDYFPEPVTVSWNSGALTSGVHTFPAVLQSSGLYSLSSVVTVPSSSLGTQTYICNVNHKPSDTKVDKKVEPKSCDKTHTCPPCPAPPVAGPSVFLFPPKPKDTLMISRTPEVTCVVVDVKHEDPEVKFNWYVDGVEVHNAKTKPREEEYNSTYRVVSVLTVLHQDWLNGKEYKCKVSNKALPAPIEKTISKAKGQPREPQVYTLPPSREEMTKNQVSLTCDVSGFYPSDIAVEWESDGQPENNYKTTPPVLDSDGSFFLYSKLTVDKSRWEQGDVFSCSVMHEALHNHYTQKSLSLSPGK

SEQ ID NO: 403 - protein, 485 aa, Artificial Sequence; identical to SEQ ID NO: 400
  Description of Artificial Sequence: Synthetic polypeptide
  XENP33971 Chain 2 - [CD3]_L1.47_H1.32_scFv(GKPGS)4_Fc(216)_ IgG1_C220S/PVA_/S267K/S364K/E357Q

SEQ ID NO: 404 - protein, 214 aa, Artificial Sequence; identical to SEQ ID NO: 365
  Description of Artificial Sequence: Synthetic polypeptide
  XENP33971 Chain 3 - MESO-C[MSLN]_L1.14 Light Chain

SEQ ID NO: 405 - protein, 449 aa, Artificial Sequence
  Description of Artificial Sequence: Synthetic polypeptide
  XENP33973 Chain 1 - MESO-C[MSLN]_H1.16_IgG1_pI(-)_Isosteric _A_PVA_/S267K/L368D/K370S
QVQLVQSGAEVKKPGASVKVSCKASGYTFTSYWMHWVRQAPGQGLEWMGWIHPQSDNTIYYEKFQGRVTMTVDKSISTAYMELSRLRSDDTAVYYCARIITPVVPKFDYWGQGTLVTVSSASTKGPSVFPLAPSSKSTSGGTAALGCLVKDYFPEPVTVSWNSGALTSGVHTFPAVLQSSGLYSLSSVVTVPSSSLGTQTYICNVNHKPSDTKVDKKVEPKSCDKTHTCPPCPAPPVAGPSVFLFPPKPKDTLMISRTPEVTCVVVDVKHEDPEVKFNWYVDGVEVHNAKTKPREEEYNSTYRVVSVLTVLHQDWLNGKEYKCKVSNKALPAPIEKTISKAKGQPREPQVYTLPPSREEMTKNQVSLTCDVSGFYPSDIAVEWESDGQPENNYKTTPPVLDSDGSFFLYSKLTVDKSRWEQGDVFSCSVMHEALHNHYTQKSLSLSPGK

SEQ ID NO: 406 - protein, 485 aa, Artificial Sequence; identical to SEQ ID NO: 400
  Description of Artificial Sequence: Synthetic polypeptide
  XENP33973 Chain 2 - [CD3]_L1.47_H1.32_scFv(GKPGS)4_Fc(216)_ IgG1_C220S/PVA_/S267K/S364K/E357Q

SEQ ID NO: 407 - protein, 214 aa, Artificial Sequence; identical to SEQ ID NO: 365
  Description of Artificial Sequence: Synthetic polypeptide
  XENP33973 Chain 3 - MESO-C[MSLN]_L1.14 Light Chain

SEQ ID NO: 408 - protein, 453 aa, Artificial Sequence; identical to SEQ ID NO: 229
  Description of Artificial Sequence: Synthetic polypeptide
  XENP16251 Chain 1 - MESO-A[MSLN]_H1.1_L1_Fab_IgG1_pI(-)_Iso steric_A_/PVA_/S267K/L368D/K370S

SEQ ID NO: 409 - protein, 485 aa, Artificial Sequence
  Description of Artificial Sequence: Synthetic polypeptide
  XENP16251 Chain 2 - [CD3]_H1.33_L1.47_scFv(GKPGS)4_Fc(216)_ IgG1_C220S/PVA_/S267K/S364K/E357Q
EVQLVESGGGLVQPGGSLRLSCAASGFTFSTYAMNWVRQAPGKGLEWVGRIRSKYNNYATYYADSVKGRFTISRDDSKNTLYLQMNSLRAEDTAVYYCVRHGNFGDSYVSWFDYWGQGTLVTVSSGKPGSGKPGSGKPGSGKPGSQAVVTQEPSLTVSPGGTVTLTCGSSTGAVTTSNYANWVQQKPGKSPRGLIGGTNKRAPGVPARFSGSLLGGKAALTISGAQPEDEADYYCALWYSNHWVFGGGTKLTVLEPKSSDKTHTCPPCPAPPVAGPSVFLFPPKPKDTLMISRTPEVTCVVVDVKHEDPEVKFNWYVDGVEVHNAKTKPREEQYNSTYRVVSVLTVLHQDWLNGKEYKCKVSNKALPAPIEKTISKAKGQPREPQVYTLPPSREQMTKNQVKLTCLVKGFYPSDIAVEWESNGQPENNYKTTPPVLDSDGSFFLYSKLTVDKSRWQQGNVFSCSVMHEALHNHYTQKSLSLSPGK

SEQ ID NO: 410 - protein, 213 aa, Artificial Sequence; identical to SEQ ID NO: 226
  Description of Artificial Sequence: Synthetic polypeptide
  XENP16251 Chain 3 - MESO-A[MSLN]_L1 Light Chain

SEQ ID NO: 411 - protein, 452 aa, Artificial Sequence; identical to SEQ ID NO: 285
  Description of Artificial Sequence: Synthetic polypeptide
  XENP16834 Chain 1 - MESO-B[MSLN]_H0L0_Fab_IgG1_pI(-)_Isoste ric_A_/PVA_/S267K/L368D/K370S

SEQ ID NO: 412 - protein, 485 aa, Artificial Sequence; identical to SEQ ID NO: 409
  Description of Artificial Sequence: Synthetic polypeptide
  XENP16834 Chain 2 - [CD3]_H1.33_L1.47_scFv(GKPGS)4_Fc(216)_ IgG1_C220S/PVA_/S267K/S364K/E357Q

SEQ ID NO: 413 - protein, 221 aa, Artificial Sequence; identical to SEQ ID NO: 240
  Description of Artificial Sequence: Synthetic polypeptide
  XENP16834 Chain 3 - MESO-B[MSLN]_L0 Light Chain

SEQ ID NO: 414 - protein, 453 aa, Artificial Sequence; identical to SEQ ID NO: 229
  Description of Artificial Sequence: Synthetic polypeptide
  XENP16252 Chain 1 - MESO-A[MSLN]_H1.1_L1_Fab_IgG1_pI(-)_Iso steric_A_/PVA_/S267K/L368D/K370S

SEQ ID NO: 415 - protein, 485 aa, Artificial Sequence
  Description of Artificial Sequence: Synthetic polypeptide
  XENP16252 Chain 2 - [CD3]_H1.31_L1.47_scFv(GKPGS)4_Fc(216)_ IgG1_C220S/PVA_/S267K/S364K/E357Q
EVQLVESGGGLVQPGGSLRLSCAASGFTFSTYAMSWVRQAPGKGLEWVGRIRSKYNNYATYYADSVKGRFTISRDDSKNTLYLQMNSLRAEDTAVYYCVRHGNFGDSYVSWFAYWGQGTLVTVSSGKPGSGKPGSGKPGSGKPGSQAVVTQEPSLTVSPGGTVTLTCGSSTGAVTTSNYANWVQQKPGKSPRGLIGGTNKRAPGVPARFSGSLLGGKAALTISGAQPEDEADYYCALWYSNHWVFGGGTKLTVLEPKSSDKTHTCPPCPAPPVAGPSVFLFPPKPKDTLMISRTPEVTCVVVDVKHEDPEVKFNWYVDGVEVHNAKTKPREEQYNSTYRVVSVLTVLHQDWLNGKEYKCKVSNKALPAPIEKTISKAKGQPREPQVYTLPPSREQMTKNQVKLTCLVKGFYPSDIAVEWESNGQPENNYKTTPPVLDSDGSFFLYSKLTVDKSRWQQGNVFSCSVMHEALHNHYTQKSLSLSPGK

SEQ ID NO: 416 - protein, 213 aa, Artificial Sequence; identical to SEQ ID NO: 226
  Description of Artificial Sequence: Synthetic polypeptide
  XENP16252 Chain 3 - MESO-A[MSLN]_L1 Light Chain

SEQ ID NO: 417 - protein, 452 aa, Artificial Sequence; identical to SEQ ID NO: 285
  Description of Artificial Sequence: Synthetic polypeptide
  XENP16835 Chain 1 - MESO-B[MSLN]_H0L0_Fab_IgG1_pI(-)_Isoste ric_A_/PVA_/S267K/L368D/K370S

SEQ ID NO: 418 - protein, 485 aa, Artificial Sequence; identical to SEQ ID NO: 415
  Description of Artificial Sequence: Synthetic polypeptide
  XENP16835 Chain 2 - [CD3]_H1.31_L1.47_scFv(GKPGS)4_Fc(216)_ IgG1_C220S/PVA_/S267K/S364K/E357Q

SEQ ID NO: 419 - protein, 221 aa, Artificial Sequence; identical to SEQ ID NO: 240
  Description of Artificial Sequence: Synthetic polypeptide
  XENP16835 Chain 3 - MESO-B[MSLN]_L0 Light Chain

SEQ ID NO: 420 - protein, 453 aa, Artificial Sequence; identical to SEQ ID NO: 229
  Description of Artificial Sequence: Synthetic polypeptide
  XENP31063 Chain 1 - MESO-A[MSLN]_H1.1_IgG1_pI(-)_Isosteric_ A_/PVA_/S267K/L368D/K370S

SEQ ID NO: 421 - protein, 726 aa, Artificial Sequence
  Description of Artificial Sequence: Synthetic polypeptide
  XENP31063 Chain 2 - MESO-A[MSLN]_H1.1_[CD3]_H1.30_L1.47_scF v(GKPGS)4_Fc(216)_IgG1_C220S/PVA_/S267K/S364K/E357Q
EVQLVESGGGLVQPGGSLKLSCAASGFDFSRYWMSWVRQAPGKGLEWVSEINPDSSTIVYTPSVKGRFTISRDNAKNSLYLQMNSLRAEDTAVYYCARRGSHYYGYRTGYFDVWGAGTTVTVSSASTKGPSVFPLAPSSKSTSGGTAALGCLVKDYFPEPVTVSWNSGALTSGVHTFPAVLQSSGLYSLSSVVTVPSSSLGTQTYICNVNHKPSNTKVDKKVEPKSCGGGGSGGGGSEVQLVESGGGLVQPGGSLRLSCAASGFTFSTYAMNWVRQAPGKGLEWVGRIRSKYNNYATYYADSVKGRFTISRDDSKNTLYLQMNSLRAEDTAVYYCVRHGNFGDSYVSWFAYWGQGTLVTVSSGKPGSGKPGSGKPGSGKPGSQAVVTQEPSLTVSPGGTVTLTCGSSTGAVTTSNYANWVQQKPGKSPRGLIGGTNKRAPGVPARFSGSLLGGKAALTISGAQPEDEADYYCALWYSNHWVFGGGTKLTVLGGGGSGGGGSKTHTCPPCPAPPVAGPSVFLFPPKPKDTLMISRTPEVTCVVVDVKHEDPEVKFNWYVDGVEVHNAKTKPREEQYNSTYRVVSVLTVLHQDWLNGKEYKCKVSNKALPAPIEKTISKAKGQPREPQVYTLPPSREQMTKNQVKLTCLVKGFYPSDIAVEWESNGQPENNYKTTPPVLDSDGSFFLYSKLTVDKSRWQQGNVFSCSVMHEALHNHYTQKSLSLSPGK

SEQ ID NO: 422 - protein, 213 aa, Artificial Sequence; identical to SEQ ID NO: 226
  Description of Artificial Sequence: Synthetic polypeptide
  XENP31063 Chain 3 - MESO-A[MSLN]_L1 Light Chain

SEQ ID NO: 423 - protein, 452 aa, Artificial Sequence; identical to SEQ ID NO: 285
  Description of Artificial Sequence: Synthetic polypeptide
  XENP31067 Chain 1 - MESO-B[MSLN]_H0_IgG1_pI(-)_Isosteric_A_ /PVA_/S267K/L368D/K370S

SEQ ID NO: 424 - protein, 725 aa, Artificial Sequence
  Description of Artificial Sequence: Synthetic polypeptide
  XENP31067 Chain 2 - MESO-B[MSLN]_H0_[CD3]_H1.30_L1.47_scFv( GKPGS)4_Fc(216)_IgG1_C220S/PVA_/S267K/S364K/E357Q
QVQLQQSGPGLVTPSQTLSLTCAISGDSVSSNSATWNWIRQSPSRGLEWLGRTYYRSKWYNDYAVSVKSRMSINPDTSKNQFSLQLNSVTPEDTAVYYCARGMMTYYYGMDVWGQGTTVTVSSASTKGPSVFPLAPSSKSTSGGTAALGCLVKDYFPEPVTVSWNSGALTSGVHTFPAVLQSSGLYSLSSVVTVPSSSLGTQTYICNVNHKPSNTKVDKKVEPKSCGGGGSGGGGSEVQLVESGGGLVQPGGSLRLSCAASGFTFSTYAMNWVRQAPGKGLEWVGRIRSKYNNYATYYADSVKGRFTISRDDSKNTLYLQMNSLRAEDTAVYYCVRHGNFGDSYVSWFAYWGQGTLVTVSSGKPGSGKPGSGKPGSGKPGSQAVVTQEPSLTVSPGGTVTLTCGSSTGAVTTSNYANWVQQKPGKSPRGLIGGTNKRAPGVPARFSGSLLGGKAALTISGAQPEDEADYYCALWYSNHWVFGGGTKLTVLGGGGSGGGGSKTHTCPPCPAPPVAGPSVFLFPPKPKDTLMISRTPEVTCVVVDVKHEDPEVKFNWYVDGVEVHNAKTKPREEQYNSTYRVVSVLTVLHQDWLNGKEYKCKVSNKALPAPIEKTISKAKGQPREPQVYTLPPSREQMTKNQVKLTCLVKGFYPSDIAVEWESNGQPENNYKTTPPVLDSDGSFFLYSKLTVDKSRWQQGNVFSCSVMHEALHNHYTQKSLSLSPGK

SEQ ID NO: 425 - protein, 221 aa, Artificial Sequence; identical to SEQ ID NO: 240
  Description of Artificial Sequence: Synthetic polypeptide
  XENP31067 Chain 3 - MESO-B[MSLN]_L0 Light Chain

SEQ ID NO: 426 - protein, 449 aa, Artificial Sequence; identical to SEQ ID NO: 288
  Description of Artificial Sequence: Synthetic polypeptide
  XENP31705 Chain 1 - MESO-C[MSLN]_H1_IgG1_pI(-)_Isosteric_A_ /PVA_/S267K/L368D/K370S

SEQ ID NO: 427 - protein, 722 aa, Artificial Sequence
  Description of Artificial Sequence: Synthetic polypeptide
  XENP31705 Chain 2 - MESO-C[MSLN]_H1_[CD3]_H1.30_L1.47_scFv( GKPGS)4_Fc(216)_IgG1_C220S/PVA_/S267K/S364K/E357Q
QVQLVQSGAEVKKPGASVKVSCKASGYTFTSYWMHWVRQAPGQGLEWMGMIHPNSDNTIYYEKFQGRVTMTVDKSISTAYMELSRLRSDDTAVYYCAIIITPVVPKFDYWGQGTLVTVSSASTKGPSVFPLAPSSKSTSGGTAALGCLVKDYFPEPVTVSWNSGALTSGVHTFPAVLQSSGLYSLSSVVTVPSSSLGTQTYICNVNHKPSNTKVDKKVEPKSCGGGGSGGGGSEVQLVESGGGLVQPGGSLRLSCAASGFTFSTYAMNWVRQAPGKGLEWVGRIRSKYNNYATYYADSVKGRFTISRDDSKNTLYLQMNSLRAEDTAVYYCVRHGNFGDSYVSWFAYWGQGTLVTVSSGKPGSGKPGSGKPGSGKPGSQAVVTQEPSLTVSPGGTVTLTCGSSTGAVTTSNYANWVQQKPGKSPRGLIGGTNKRAPGVPARFSGSLLGGKAALTISGAQPEDEADYYCALWYSNHWVFGGGTKLTVLGGGGSGGGGSKTHTCPPCPAPPVAGPSVFLFPPKPKDTLMISRTPEVTCVVVDVKHEDPEVKFNWYVDGVEVHNAKTKPREEQYNSTYRVVSVLTVLHQDWLNGKEYKCKVSNKALPAPIEKTISKAKGQPREPQVYTLPPSREQMTKNQVKLTCLVKGFYPSDIAVEWESNGQPENNYKTTPPVLDSDGSFFLYSKLTVDKSRWQQGNVFSCSVMHEALHNHYTQKSLSLSPGK

SEQ ID NO: 428 - protein, 214 aa, Artificial Sequence; identical to SEQ ID NO: 250
  Description of Artificial Sequence: Synthetic polypeptide
  XENP31705 Chain 3 - MESO-C[MSLN]_L1 Light Chain

SEQ ID NO: 429 - protein, 453 aa, Artificial Sequence; identical to SEQ ID NO: 229
  Description of Artificial Sequence: Synthetic polypeptide
  XENP31451 Chain 1 - MESO-A[MSLN]_H1.1_IgG1_pI(-)_Isosteric_ A_/PVA_/S267K/L368D/K370S

SEQ ID NO: 430 - protein, 726 aa, Artificial Sequence
  Description of Artificial Sequence: Synthetic polypeptide
  XENP31451 Chain 2 - MESO-A[MSLN]_H1.1_(G4S)2_[CD3]_L1.47_H1 .30_scFv(GKPGS)4_Fc(216)_IgG1_C220S/PVA_/S267K/S364K/E357Q
EVQLVESGGGLVQPGGSLKLSCAASGFDFSRYWMSWVRQAPGKGLEWVSEINPDSSTIVYTPSVKGRFTISRDNAKNSLYLQMNSLRAEDTAVYYCARRGSHYYGYRTGYFDVWGAGTTVTVSSASTKGPSVFPLAPSSKSTSGGTAALGCLVKDYFPEPVTVSWNSGALTSGVHTFPAVLQSSGLYSLSSVVTVPSSSLGTQTYICNVNHKPSNTKVDKKVEPKSCGGGGSGGGGSQAVVTQEPSLTVSPGGTVTLTCGSSTGAVTTSNYANWVQQKPGKSPRGLIGGTNKRAPGVPARFSGSLLGGKAALTISGAQPEDEADYYCALWYSNHWVFGGGTKLTVLGKPGSGKPGSGKPGSGKPGSEVQLVESGGGLVQPGGSLRLSCAASGFTFSTYAMNWVRQAPGKGLEWVGRIRSKYNNYATYYADSVKGRFTISRDDSKNTLYLQMNSLRAEDTAVYYCVRHGNFGDSYVSWFAYWGQGTLVTVSSGGGGSGGGGSKTHTCPPCPAPPVAGPSVFLFPPKPKDTLMISRTPEVTCVVVDVKHEDPEVKFNWYVDGVEVHNAKTKPREEQYNSTYRVVSVLTVLHQDWLNGKEYKCKVSNKALPAPIEKTISKAKGQPREPQVYTLPPSREQMTKNQVKLTCLVKGFYPSDIAVEWESNGQPENNYKTTPPVLDSDGSFFLYSKLTVDKSRWQQGNVFSCSVMHEALHNHYTQKSLSLSPGK

SEQ ID NO: 431 - protein, 213 aa, Artificial Sequence; identical to SEQ ID NO: 226
  Description of Artificial Sequence: Synthetic polypeptide
  XENP31451 Chain 3 - MESO-A[MSLN]_L1 Light Chain

SEQ ID NO: 432 - protein, 452 aa, Artificial Sequence; identical to SEQ ID NO: 285
  Description of Artificial Sequence: Synthetic polypeptide
  XENP31452 Chain 1 - MESO-B[MSLN]_H0_IgG1_pI(-)_Isosteric_A_ /PVA_/S267K/L368D/K370S

SEQ ID NO: 433 - protein, 725 aa, Artificial Sequence
  Description of Artificial Sequence: Synthetic polypeptide
  XENP31452 Chain 2 - MESO-B[MSLN]_H0_(G4S)2_[CD3]_L1.47_H1.3 0_scFv(GKPGS)4_Fc(216)_IgG1_C220S/PVA_/S267K/S364K/E357Q
QVQLQQSGPGLVTPSQTLSLTCAISGDSVSSNSATWNWIRQSPSRGLEWLGRTYYRSKWYNDYAVSVKSRMSINPDTSKNQFSLQLNSVTPEDTAVYYCARGMMTYYYGMDVWGQGTTVTVSSASTKGPSVFPLAPSSKSTSGGTAALGCLVKDYFPEPVTVSWNSGALTSGVHTFPAVLQSSGLYSLSSVVTVPSSSLGTQTYICNVNHKPSNTKVDKKVEPKSCGGGGSGGGGSQAVVTQEPSLTVSPGGTVTLTCGSSTGAVTTSNYANWVQQKPGKSPRGLIGGTNKRAPGVPARFSGSLLGGKAALTISGAQPEDEADYYCALWYSNHWVFGGGTKLTVLGKPGSGKPGSGKPGSGKPGSEVQLVESGGGLVQPGGSLRLSCAASGFTFSTYAMNWVRQAPGKGLEWVGRIRSKYNNYATYYADSVKGRFTISRDDSKNTLYLQMNSLRAEDTAVYYCVRHGNFGDSYVSWFAYWGQGTLVTVSSGGGGSGGGGSKTHTCPPCPAPPVAGPSVFLFPPKPKDTLMISRTPEVTCVVVDVKHEDPEVKFNWYVDGVEVHNAKTKPREEQYNSTYRVVSVLTVLHQDWLNGKEYKCKVSNKALPAPIEKTISKAKGQPREPQVYTLPPSREQMTKNQVKLTCLVKGFYPSDIAVEWESNGQPENNYKTTPPVLDSDGSFFLYSKLTVDKSRWQQGNVFSCSVMHEALHNHYTQKSLSLSPGK

SEQ ID NO: 434 - protein, 221 aa, Artificial Sequence; identical to SEQ ID NO: 240
  Description of Artificial Sequence: Synthetic polypeptide
  XENP31452 Chain 3 - MESO-B[MSLN]_L0 Light Chain

SEQ ID NO: 435 - protein, 449 aa, Artificial Sequence; identical to SEQ ID NO: 288
  Description of Artificial Sequence: Synthetic polypeptide
  XENP31713 Chain 1 - MESO-C[MSLN]_H1_IgG1_pI(-)_Isosteric_A_ /PVA_/S267K/L368D/K370S

SEQ ID NO: 436 - protein, 722 aa, Artificial Sequence
  Description of Artificial Sequence: Synthetic polypeptide
  XENP31713 Chain 2 - MESO-C[MSLN]_H1_[CD3]_L1.47_H1.30_scFv( GKPGS)4_Fc(216)_IgG1_C220S/PVA_/S267K/S364K/E357Q
QVQLVQSGAEVKKPGASVKVSCKASGYTFTSYWMHWVRQAPGQGLEWMGMIHPNSDNTIYYEKFQGRVTMTVDKSISTAYMELSRLRSDDTAVYYCAIIITPVVPKFDYWGQGTLVTVSSASTKGPSVFPLAPSSKSTSGGTAALGCLVKDYFPEPVTVSWNSGALTSGVHTFPAVLQSSGLYSLSSVVTVPSSSLGTQTYICNVNHKPSNTKVDKKVEPKSCGGGGSGGGGSQAVVTQEPSLTVSPGGTVTLTCGSSTGAVTTSNYANWVQQKPGKSPRGLIGGTNKRAPGVPARFSGSLLGGKAALTISGAQPEDEADYYCALWYSNHWVFGGGTKLTVLGKPGSGKPGSGKPGSGKPGSEVQLVESGGGLVQPGGSLRLSCAASGFTFSTYAMNWVRQAPGKGLEWVGRIRSKYNNYATYYADSVKGRFTISRDDSKNTLYLQMNSLRAEDTAVYYCVRHGNFGDSYVSWFAYWGQGTLVTVSSGGGGSGGGGSKTHTCPPCPAPPVAGPSVFLFPPKPKDTLMISRTPEVTCVVVDVKHEDPEVKFNWYVDGVEVHNAKTKPREEQYNSTYRVVSVLTVLHQDWLNGKEYKCKVSNKALPAPIEKTISKAKGQPREPQVYTLPPSREQMTKNQVKLTCLVKGFYPSDIAVEWESNGQPENNYKTTPPVLDSDGSFFLYSKLTVDKSRWQQGNVFSCSVMHEALHNHYTQKSLSLSPGK

SEQ ID NO: 437 - protein, 214 aa, Artificial Sequence; identical to SEQ ID NO: 250
  Description of Artificial Sequence: Synthetic polypeptide
  XENP31713 Chain 3 - MESO-C[MSLN]_L1 Light Chain

SEQ ID NO: 438 - protein, 453 aa, Artificial Sequence; identical to SEQ ID NO: 229
  Description of Artificial Sequence: Synthetic polypeptide
  XENP31064 Chain 1 - MESO-A[MSLN]_H1.1_IgG1_pI(-)_Isosteric_ A_/PVA_/S267K/L368D/K370S

SEQ ID NO: 439 - protein, 726 aa, Artificial Sequence
  Description of Artificial Sequence: Synthetic polypeptide
  XENP31064 Chain 2 - MESO-A[MSLN]_H1.1_[CD3]_H1.32_L1.47_scF v(GKPGS)4_Fc(216)_IgG1_C220S/PVA_/S267K/S364K/E357Q
EVQLVESGGGLVQPGGSLKLSCAASGFDFSRYWMSWVRQAPGKGLEWVSEINPDSSTIVYTPSVKGRFTISRDNAKNSLYLQMNSLRAEDTAVYYCARRGSHYYGYRTGYFDVWGAGTTVTVSSASTKGPSVFPLAPSSKSTSGGTAALGCLVKDYFPEPVTVSWNSGALTSGVHTFPAVLQSSGLYSLSSVVTVPSSSLGTQTYICNVNHKPSNTKVDKKVEPKSCGGGGSGGGGSEVQLVESGGGLVQPGGSLRLSCAASGFTFSTYAMNWVRQAPGKGLEWVGRIRSKANNYATYYADSVKGRFTISRDDSKNTLYLQMNSLRAEDTAVYYCVRHGNFGDSYVSWFAYWGQGTLVTVSSGKPGSGKPGSGKPGSGKPGSQAVVTQEPSLTVSPGGTVTLTCGSSTGAVTTSNYANWVQQKPGKSPRGLIGGTNKRAPGVPARFSGSLLGGKAALTISGAQPEDEADYYCALWYSNHWVFGGGTKLTVLGGGGSGGGGSKTHTCPPCPAPPVAGPSVFLFPPKPKDTLMISRTPEVTCVVVDVKHEDPEVKFNWYVDGVEVHNAKTKPREEQYNSTYRVVSVLTVLHQDWLNGKEYKCKVSNKALPAPIEKTISKAKGQPREPQVYTLPPSREQMTKNQVKLTCLVKGFYPSDIAVEWESNGQPENNYKTTPPVLDSDGSFFLYSKLTVDKSRWQQGNVFSCSVMHEALHNHYTQKSLSLSPGK

SEQ ID NO: 440 - protein, 213 aa, Artificial Sequence; identical to SEQ ID NO: 226
  Description of Artificial Sequence: Synthetic polypeptide
  XENP31064 Chain 3 - MESO-A[MSLN]_L1 Light Chain

SEQ ID NO: 441 - protein, 452 aa, Artificial Sequence; identical to SEQ ID NO: 285
  Description of Artificial Sequence: Synthetic polypeptide
  XENP31068 Chain 1 - MESO-B[MSLN]_H0_IgG1_pI(-)_Isosteric_A_ /PVA_/S267K/L368D/K370S

SEQ ID NO: 442 - protein, 725 aa, Artificial Sequence
  Description of Artificial Sequence: Synthetic polypeptide
  XENP31068 Chain 2 - MESO-B[MSLN]_H0_[CD3]_H1.32_L1.47_scFv( GKPGS)4_Fc(216)_IgG1_C220S/PVA_/S267K/S364K/E357Q
QVQLQQSGPGLVTPSQTLSLTCAISGDSVSSNSATWNWIRQSPSRGLEWLGRTYYRSKWYNDYAVSVKSRMSINPDTSKNQFSLQLNSVTPEDTAVYYCARGMMTYYYGMDVWGQGTTVTVSSASTKGPSVFPLAPSSKSTSGGTAALGCLVKDYFPEPVTVSWNSGALTSGVHTFPAVLQSSGLYSLSSVVTVPSSSLGTQTYICNVNHKPSNTKVDKKVEPKSCGGGGSGGGGSEVQLVESGGGLVQPGGSLRLSCAASGFTFSTYAMNWVRQAPGKGLEWVGRIRSKANNYATYYADSVKGRFTISRDDSKNTLYLQMNSLRAEDTAVYYCVRHGNFGDSYVSWFAYWGQGTLVTVSSGKPGSGKPGSGKPGSGKPGSQAVVTQEPSLTVSPGGTVTLTCGSSTGAVTTSNYANWVQQKPGKSPRGLIGGTNKRAPGVPARFSGSLLGGKAALTISGAQPEDEADYYCALWYSNHWVFGGGTKLTVLGGGGSGGGGSKTHTCPPCPAPPVAGPSVFLFPPKPKDTLMISRTPEVTCVVVDVKHEDPEVKFNWYVDGVEVHNAKTKPREEQYNSTYRVVSVLTVLHQDWLNGKEYKCKVSNKALPAPIEKTISKAKGQPREPQVYTLPPSREQMTKNQVKLTCLVKGFYPSDIAVEWESNGQPENNYKTTPPVLDSDGSFFLYSKLTVDKSRWQQGNVFSCSVMHEALHNHYTQKSLSLSPGK

SEQ ID NO: 443 - protein, 221 aa, Artificial Sequence; identical to SEQ ID NO: 240
  Description of Artificial Sequence: Synthetic polypeptide
  XENP31068 Chain 3 - MESO-B[MSLN]_L0 Light Chain

SEQ ID NO: 444 - protein, 449 aa, Artificial Sequence; identical to SEQ ID NO: 288
  Description of Artificial Sequence: Synthetic polypeptide
  XENP31709 Chain 1 - MESO-C[MSLN]_H1_IgG1_pI(-)_Isosteric_A_ /PVA_/S267K/L368D/K370S

SEQ ID NO: 445 - protein, 722 aa, Artificial Sequence
  Description of Artificial Sequence: Synthetic polypeptide
  XENP31709 Chain 2 - MESO-C[MSLN]_H1_[CD3]_H1.32_L1.47_scFv( GKPGS)4_Fc(216)_IgG1_C220S/PVA_/S267K/S364K/E357Q
QVQLVQSGAEVKKPGASVKVSCKASGYTFTSYWMHWVRQAPGQGLEWMGMIHPNSDNTIYYEKFQGRVTMTVDKSISTAYMELSRLRSDDTAVYYCAIIITPVVPKFDYWGQGTLVTVSSASTKGPSVFPLAPSSKSTSGGTAALGCLVKDYFPEPVTVSWNSGALTSGVHTFPAVLQSSGLYSLSSVVTVPSSSLGTQTYICNVNHKPSNTKVDKKVEPKSCGGGGSGGGGSEVQLVESGGGLVQPGGSLRLSCAASGFTFSTYAMNWVRQAPGKGLEWVGRIRSKANNYATYYADSVKGRFTISRDDSKNTLYLQMNSLRAEDTAVYYCVRHGNFGDSYVSWFAYWGQGTLVTVSSGKPGSGKPGSGKPGSGKPGSQAVVTQEPSLTVSPGGTVTLTCGSSTGAVTTSNYANWVQQKPGKSPRGLIGGTNKRAPGVPARFSGSLLGGKAALTISGAQPEDEADYYCALWYSNHWVFGGGTKLTVLGGGGSGGGGSKTHTCPPCPAPPVAGPSVFLFPPKPKDTLMISRTPEVTCVVVDVKHEDPEVKFNWYVDGVEVHNAKTKPREEQYNSTYRVVSVLTVLHQDWLNGKEYKCKVSNKALPAPIEKTISKAKGQPREPQVYTLPPSREQMTKNQVKLTCLVKGFYPSDIAVEWESNGQPENNYKTTPPVLDSDGSFFLYSKLTVDKSRWQQGNVFSCSVMHEALHNHYTQKSLSLSPGK

SEQ ID NO: 446 - protein, 214 aa, Artificial Sequence; identical to SEQ ID NO: 250
  Description of Artificial Sequence: Synthetic polypeptide
  XENP31709 Chain 3 - MESO-C[MSLN]_L1 Light Chain

SEQ ID NO: 447 - protein, 449 aa, Artificial Sequence; identical to SEQ ID NO: 288
  Description of Artificial Sequence: Synthetic polypeptide
  XENP32744 Chain 1 - MESO-C[MSLN]_H1_IgG1_pI(-)_Isosteric_A_ /PVA_/S267K/L368D/K370S

SEQ ID NO: 448 - protein, 722 aa, Artificial Sequence; identical to SEQ ID NO: 445
  Description of Artificial Sequence: Synthetic polypeptide
  XENP32744 Chain 2 - MESO-C[MSLN]_H1_(G4S)2_[CD3]_H1.32_L1.4 7_scFv(GKPGS)4_Fc(216)_IgG1_C220S/PVA_/S267K/S364K/E357Q

SEQ ID NO: 449 - protein, 214 aa, Artificial Sequence; identical to SEQ ID NO: 326
  Description of Artificial Sequence: Synthetic polypeptide
  XENP32744 Chain 3 - MESO-C[MSLN]_L1.3 Light Chain

SEQ ID NO: 450 - protein, 449 aa, Artificial Sequence; identical to SEQ ID NO: 288
  Description of Artificial Sequence: Synthetic polypeptide
  XENP32747 Chain 1 - MESO-C[MSLN]_H1_IgG1_pI(-)_Isosteric_A_ /PVA_/S267K/L368D/K370S

SEQ ID NO: 451 - protein, 722 aa, Artificial Sequence; identical to SEQ ID NO: 445
  Description of Artificial Sequence: Synthetic polypeptide
  XENP32747 Chain 2 - MESO-C[MSLN]_H1_(G4S)2_[CD3]_H1.32_L1.4 7_scFv(GKPGS)4_Fc(216)_IgG1_C220S/PVA_/S267K/S364K/E357Q

SEQ ID NO: 452 - protein, 214 aa, Artificial Sequence; identical to SEQ ID NO: 329
  Description of Artificial Sequence: Synthetic polypeptide
  XENP32747 Chain 3 - MESO-C[MSLN]_L1.4 Light Chain

SEQ ID NO: 453 - protein, 449 aa, Artificial Sequence; identical to SEQ ID NO: 288
  Description of Artificial Sequence: Synthetic polypeptide
  XENP32750 Chain 1 - MESO-C[MSLN]_H1_IgG1_pI(-)_Isosteric_A_ /PVA_/S267K/L368D/K370S

SEQ ID NO: 454 - protein, 722 aa, Artificial Sequence; identical to SEQ ID NO: 445
  Description of Artificial Sequence: Synthetic polypeptide
  XENP32750 Chain 2 - MESO-C[MSLN]_H1_(G4S)2_[CD3]_H1.32_L1.4 7_scFv(GKPGS)4_Fc(216)_IgG1_C220S/PVA_/S267K/S364K/E357Q

SEQ ID NO: 455 - protein, 214 aa, Artificial Sequence; identical to SEQ ID NO: 332
  Description of Artificial Sequence: Synthetic polypeptide
  XENP32750 Chain 3 - MESO-C[MSLN]_L1.5 Light Chain

SEQ ID NO: 456 - protein, 449 aa, Artificial Sequence; identical to SEQ ID NO: 288
  Description of Artificial Sequence: Synthetic polypeptide
  XENP32851 Chain 1 - MESO-C[MSLN]_H1_IgG1_pI(-)_Isosteric_A_ /PVA_/S267K/L368D/K370S

SEQ ID NO: 457 - protein, 722 aa, Artificial Sequence; identical to SEQ ID NO: 445
  Description of Artificial Sequence: Synthetic polypeptide
  XENP32851 Chain 2 - MESO-C[MSLN]_H1_(G4S)2_[CD3]_H1.32_L1.4 7_scFv(GKPGS)4_Fc(216)_IgG1_C220S/PVA_/S267K/S364K/E357Q

SEQ ID NO: 458 - protein, 214 aa, Artificial Sequence; identical to SEQ ID NO: 344
  Description of Artificial Sequence: Synthetic polypeptide
  XENP32851 Chain 3 - MESO-C[MSLN]_L1.9 Light Chain

SEQ ID NO: 459 - protein, 453 aa, Artificial Sequence; identical to SEQ ID NO: 229
  Description of Artificial Sequence: Synthetic polypeptide
  XENP31453 Chain 1 - MESO-A[MSLN]_H1.1_IgG1_pI(-)_Isosteric_ A_/PVA_/S267K/L368D/K370S

SEQ ID NO: 460 - protein, 726 aa, Artificial Sequence
  Description of Artificial Sequence: Synthetic polypeptide
  XENP31453 Chain 2 - MESO-A[MSLN]_H1.1_(G4S)2_[CD3]_L1.47_H1 .32_scFv(GKPGS)4_Fc(216)_IgG1_C220S/PVA_/S267K/S364K/E357Q
EVQLVESGGGLVQPGGSLKLSCAASGFDFSRYWMSWVRQAPGKGLEWVSEINPDSSTIVYTPSVKGRFTISRDNAKNSLYLQMNSLRAEDTAVYYCARRGSHYYGYRTGYFDVWGAGTTVTVSSASTKGPSVFPLAPSSKSTSGGTAALGCLVKDYFPEPVTVSWNSGALTSGVHTFPAVLQSSGLYSLSSVVTVPSSSLGTQTYICNVNHKPSNTKVDKKVEPKSCGGGGSGGGGSQAVVTQEPSLTVSPGGTVTLTCGSSTGAVTTSNYANWVQQKPGKSPRGLIGGTNKRAPGVPARFSGSLLGGKAALTISGAQPEDEADYYCALWYSNHWVFGGGTKLTVLGKPGSGKPGSGKPGSGKPGSEVQLVESGGGLVQPGGSLRLSCAASGFTFSTYAMNWVRQAPGKGLEWVGRIRSKANNYATYYADSVKGRFTISRDDSKNTLYLQMNSLRAEDTAVYYCVRHGNFGDSYVSWFAYWGQGTLVTVSSGGGGSGGGGSKTHTCPPCPAPPVAGPSVFLFPPKPKDTLMISRTPEVTCVVVDVKHEDPEVKFNWYVDGVEVHNAKTKPREEQYNSTYRVVSVLTVLHQDWLNGKEYKCKVSNKALPAPIEKTISKAKGQPREPQVYTLPPSREQMTKNQVKLTCLVKGFYPSDIAVEWESNGQPENNYKTTPPVLDSDGSFFLYSKLTVDKSRWQQGNVFSCSVMHEALHNHYTQKSLSLSPGK

SEQ ID NO: 461 - protein, 213 aa, Artificial Sequence; identical to SEQ ID NO: 226
  Description of Artificial Sequence: Synthetic polypeptide
  XENP31453 Chain 3 - MESO-A[MSLN]_L1 Light Chain

SEQ ID NO: 462 - protein, 452 aa, Artificial Sequence; identical to SEQ ID NO: 285
  Description of Artificial Sequence: Synthetic polypeptide
  XENP31454 Chain 1 - MESO-B[MSLN]_H0_IgG1_pI(-)_Isosteric_A_ /PVA_/S267K/L368D/K370S

SEQ ID NO: 463 - protein, 725 aa, Artificial Sequence
  Description of Artificial Sequence: Synthetic polypeptide
  XENP31454 Chain 2 - MESO-B[MSLN]_H0_(G4S)2_[CD3]_L1.47_H1.3 2_scFv(GKPGS)4_Fc(216)_IgG1_C220S/PVA_/S267K/S364K/E357Q
QVQLQQSGPGLVTPSQTLSLTCAISGDSVSSNSATWNWIRQSPSRGLEWLGRTYYRSKWYNDYAVSVKSRMSINPDTSKNQFSLQLNSVTPEDTAVYYCARGMMTYYYGMDVWGQGTTVTVSSASTKGPSVFPLAPSSKSTSGGTAALGCLVKDYFPEPVTVSWNSGALTSGVHTFPAVLQSSGLYSLSSVVTVPSSSLGTQTYICNVNHKPSNTKVDKKVEPKSCGGGGSGGGGSQAVVTQEPSLTVSPGGTVTLTCGSSTGAVTTSNYANWVQQKPGKSPRGLIGGTNKRAPGVPARFSGSLLGGKAALTISGAQPEDEADYYCALWYSNHWVFGGGTKLTVLGKPGSGKPGSGKPGSGKPGSEVQLVESGGGLVQPGGSLRLSCAASGFTFSTYAMNWVRQAPGKGLEWVGRIRSKANNYATYYADSVKGRFTISRDDSKNTLYLQMNSLRAEDTAVYYCVRHGNFGDSYVSWFAYWGQGTLVTVSSGGGGSGGGGSKTHTCPPCPAPPVAGPSVFLFPPKPKDTLMISRTPEVTCVVVDVKHEDPEVKFNWYVDGVEVHNAKTKPREEQYNSTYRVVSVLTVLHQDWLNGKEYKCKVSNKALPAPIEKTISKAKGQPREPQVYTLPPSREQMTKNQVKLTCLVKGFYPSDIAVEWESNGQPENNYKTTPPVLDSDGSFFLYSKLTVDKSRWQQGNVFSCSVMHEALHNHYTQKSLSLSPGK

SEQ ID NO: 464 - protein, 221 aa, Artificial Sequence; identical to SEQ ID NO: 240
  Description of Artificial Sequence: Synthetic polypeptide
  XENP31454 Chain 3 - MESO-B[MSLN]_L0 Light Chain

SEQ ID NO: 465 - protein, 449 aa, Artificial Sequence; identical to SEQ ID NO: 288
  Description of Artificial Sequence: Synthetic polypeptide
  XENP31717 Chain 1 - MESO-C[MSLN]_H1_IgG1_pI(-)_Isosteric_A_ /PVA_/S267K/L368D/K370S

SEQ ID NO: 466 - protein, 722 aa, Artificial Sequence
  Description of Artificial Sequence: Synthetic polypeptide
  XENP31717 Chain 2 - MESO-C[MSLN]_H1_[CD3]_L1.47_H1.32_scFv( GKPGS)4_Fc(216)_IgG1_C220S/PVA_/S267K/S364K/E357Q
QVQLVQSGAEVKKPGASVKVSCKASGYTFTSYWMHWVRQAPGQGLEWMGMIHPNSDNTIYYEKFQGRVTMTVDKSISTAYMELSRLRSDDTAVYYCAIIITPVVPKFDYWGQGTLVTVSSASTKGPSVFPLAPSSKSTSGGTAALGCLVKDYFPEPVTVSWNSGALTSGVHTFPAVLQSSGLYSLSSVVTVPSSSLGTQTYICNVNHKPSNTKVDKKVEPKSCGGGGSGGGGSQAVVTQEPSLTVSPGGTVTLTCGSSTGAVTTSNYANWVQQKPGKSPRGLIGGTNKRAPGVPARFSGSLLGGKAALTISGAQPEDEADYYCALWYSNHWVFGGGTKLTVLGKPGSGKPGSGKPGSGKPGSEVQLVESGGGLVQPGGSLRLSCAASGFTFSTYAMNWVRQAPGKGLEWVGRIRSKANNYATYYADSVKGRFTISRDDSKNTLYLQMNSLRAEDTAVYYCVRHGNFGDSYVSWFAYWGQGTLVTVSSGGGGSGGGGSKTHTCPPCPAPPVAGPSVFLFPPKPKDTLMISRTPEVTCVVVDVKHEDPEVKFNWYVDGVEVHNAKTKPREEQYNSTYRVVSVLTVLHQDWLNGKEYKCKVSNKALPAPIEKTISKAKGQPREPQVYTLPPSREQMTKNQVKLTCLVKGFYPSDIAVEWESNGQPENNYKTTPPVLDSDGSFFLYSKLTVDKSRWQQGNVFSCSVMHEALHNHYTQKSLSLSPGK

SEQ ID NO: 467 - protein, 214 aa, Artificial Sequence; identical to SEQ ID NO: 250
  Description of Artificial Sequence: Synthetic polypeptide
  XENP31717 Chain 3 - MESO-C[MSLN]_L1 Light Chain

SEQ ID NO: 468 - protein, 449 aa, Artificial Sequence; identical to SEQ ID NO: 288
  Description of Artificial Sequence: Synthetic polypeptide
  XENP32745 Chain 1 - MESO-C[MSLN]_H1_IgG1_pI(-)_Isosteric_A_ /PVA_/S267K/L368D/K370S

SEQ ID NO: 469 - protein, 722 aa, Artificial Sequence; identical to SEQ ID NO: 466
  Description of Artificial Sequence: Synthetic polypeptide
  XENP32745 Chain 2 - MESO-C[MSLN]_H1_(G4S)2_[CD3]_L1.47_H1.3 2_scFv(GKPGS)4_Fc(216)_IgG1_C220S/PVA_/S267K/S364K/E357Q

SEQ ID NO: 470 - protein, 214 aa, Artificial Sequence; identical to SEQ ID NO: 326
  Description of Artificial Sequence: Synthetic polypeptide
  XENP32745 Chain 3 - MESO-C[MSLN]_L1.3 Light Chain

SEQ ID NO: 471 - protein, 449 aa, Artificial Sequence; identical to SEQ ID NO: 288
  Description of Artificial Sequence: Synthetic polypeptide
  XENP32748 Chain 1 - MESO-C[MSLN]_H1_IgG1_pI(-)_Isosteric_A_ /PVA_/S267K/L368D/K370S

SEQ ID NO: 472 - protein, 722 aa, Artificial Sequence; identical to SEQ ID NO: 466
  Description of Artificial Sequence: Synthetic polypeptide
  XENP32748 Chain 2 - MESO-C[MSLN]_H1_(G4S)2_[CD3]_L1.47_H1.3 2_scFv(GKPGS)4_Fc(216)_IgG1_C220S/PVA_/S267K/S364K/E357Q

SEQ ID NO: 473 - protein, 214 aa, Artificial Sequence; identical to SEQ ID NO: 329
  Description of Artificial Sequence: Synthetic polypeptide
  XENP32748 Chain 3 - MESO-C[MSLN]_L1.4 Light Chain

SEQ ID NO: 474 - protein, 449 aa, Artificial Sequence; identical to SEQ ID NO: 288
  Description of Artificial Sequence: Synthetic polypeptide
  XENP32751 Chain 1 - MESO-C[MSLN]_H1_IgG1_pI(-)_Isosteric_A_ /PVA_/S267K/L368D/K370S

SEQ ID NO: 475 - protein, 722 aa, Artificial Sequence; identical to SEQ ID NO: 466
  Description of Artificial Sequence: Synthetic polypeptide
  XENP32751 Chain 2 - MESO-C[MSLN]_H1_(G4S)2_[CD3]_L1.47_H1.3 2_scFv(GKPGS)4_Fc(216)_IgG1_C220S/PVA_/S267K/S364K/E357Q

SEQ ID NO: 476 - protein, 213 aa, Artificial Sequence
  Description of Artificial Sequence: Synthetic polypeptide
  XENP32751 Chain 3 - MESO-C[MSLN]_L1.5 Light Chain
DIVMTQSPDSLAVSLGERATINCKASHDVGTYVAWYQQKPGQSPKLLIYWASTRHTGVPDRFTGSGSGTDFTLTISSLQAEDVAVYFCQQYSSYPLTFGAGTKLEIKRTVAAPSVFIFPPSDEQLKSGTASVVCLLNNFYPREAKVQWKVDNALQSGNSQESVTEQDSKDSTYSLSSTLTLSKADYEKHKVYACEVTHQGLSSPVTKSFNRGE

SEQ ID NO: 477 - protein, 449 aa, Artificial Sequence; identical to SEQ ID NO: 288
  Description of Artificial Sequence: Synthetic polypeptide
  XENP32852 Chain 1 - MESO-C[MSLN]_H1_IgG1_pI(-)_Isosteric_A_ /PVA_/S267K/L368D/K370S

SEQ ID NO: 478 - protein, 722 aa, Artificial Sequence; identical to SEQ ID NO: 466
  Description of Artificial Sequence: Synthetic polypeptide
  XENP32852 Chain 2 - MESO-C[MSLN]_H1_(G4S)2_[CD3]_L1.47_H1.3 2_scFv(GKPGS)4_Fc(216)_IgG1_C220S/PVA_/S267K/S364K/E357Q

SEQ ID NO: 479 - protein, 214 aa, Artificial Sequence; identical to SEQ ID NO: 344
  Description of Artificial Sequence: Synthetic polypeptide
  XENP32852 Chain 3 - MESO-C[MSLN]_L1.9 Light Chain

SEQ ID NO: 480 - protein, 449 aa, Artificial Sequence; identical to SEQ ID NO: 297
  Description of Artificial Sequence: Synthetic polypeptide
  XENP32947 Chain 1 - MESO-C[MSLN]_H1.3_IgG1_pI(-)_Isosteric_ A_/PVA_/S267K/L368D/K370S

SEQ ID NO: 481 - protein, 722 aa, Artificial Sequence
  Description of Artificial Sequence: Synthetic polypeptide
  XENP32947 Chain 2 - MESO-C[MSLN]_H1.3_(G4S)2_[CD3]_L1.47_H1 .32_scFv(GKPGS)4_Fc(216)_IgG1_C220S/PVA_/S267K/S364K/E357Q
QVQLVQSGAEVKKPGASVKVSCKASGYTFTSYWMHWVRQAPGQGLEWMGWIHPNSDNTIYYEKFQGRVTMTVDKSISTAYMELSRLRSDDTAVYYCAIIITPVVPKFDYWGQGTLVTVSSASTKGPSVFPLAPSSKSTSGGTAALGCLVKDYFPEPVTVSWNSGALTSGVHTFPAVLQSSGLYSLSSVVTVPSSSLGTQTYICNVNHKPSNTKVDKKVEPKSCGGGGSGGGGSQAVVTQEPSLTVSPGGTVTLTCGSSTGAVTTSNYANWVQQKPGKSPRGLIGGTNKRAPGVPARFSGSLLGGKAALTISGAQPEDEADYYCALWYSNHWVFGGGTKLTVLGKPGSGKPGSGKPGSGKPGSEVQLVESGGGLVQPGGSLRLSCAASGFTFSTYAMNWVRQAPGKGLEWVGRIRSKANNYATYYADSVKGRFTISRDDSKNTLYLQMNSLRAEDTAVYYCVRHGNFGDSYVSWFAYWGQGTLVTVSSGGGGSGGGGSKTHTCPPCPAPPVAGPSVFLFPPKPKDTLMISRTPEVTCVVVDVKHEDPEVKFNWYVDGVEVHNAKTKPREEQYNSTYRVVSVLTVLHQDWLNGKEYKCKVSNKALPAPIEKTISKAKGQPREPQVYTLPPSREQMTKNQVKLTCLVKGFYPSDIAVEWESNGQPENNYKTTPPVLDSDGSFFLYSKLTVDKSRWQQGNVFSCSVMHEALHNHYTQKSLSLSPGK

SEQ ID NO: 482 - protein, 214 aa, Artificial Sequence; identical to SEQ ID NO: 250
  Description of Artificial Sequence: Synthetic polypeptide
  XENP32947 Chain 3 - MESO-C[MSLN]_L1 Light Chain

SEQ ID NO: 483 - protein, 449 aa, Artificial Sequence; identical to SEQ ID NO: 354
  Description of Artificial Sequence: Synthetic polypeptide
  XENP32948 Chain 1 - MESO-C[MSLN]_H1.12_IgG1_pI(-)_Isosteric _A_/PVA_/S267K/L368D/K370S

SEQ ID NO: 484 - protein, 722 aa, Artificial Sequence
  Description of Artificial Sequence: Synthetic polypeptide
  XENP32948 Chain 2 - MESO-C[MSLN]_H1.12_(G4S)2_[CD3]_L1.47_H 1.32_scFv(GKPGS)4_Fc(216)_IgG1_C220S/PVA_/S267K/S364K/E357Q
QVQLVQSGAEVKKPGASVKVSCKASGYTFTSYWMHWVRQAPGQGLEWMGMIHPNSDNTIYYQKFQGRVTMTVDKSISTAYMELSRLRSDDTAVYYCAIIITPVVPKFDYWGQGTLVTVSSASTKGPSVFPLAPSSKSTSGGTAALGCLVKDYFPEPVTVSWNSGALTSGVHTFPAVLQSSGLYSLSSVVTVPSSSLGTQTYICNVNHKPSNTKVDKKVEPKSCGGGGSGGGGSQAVVTQEPSLTVSPGGTVTLTCGSSTGAVTTSNYANWVQQKPGKSPRGLIGGTNKRAPGVPARFSGSLLGGKAALTISGAQPEDEADYYCALWYSNHWVFGGGTKLTVLGKPGSGKPGSGKPGSGKPGSEVQLVESGGGLVQPGGSLRLSCAASGFTFSTYAMNWVRQAPGKGLEWVGRIRSKANNYATYYADSVKGRFTISRDDSKNTLYLQMNSLRAEDTAVYYCVRHGNFGDSYVSWFAYWGQGTLVTVSSGGGGSGGGGSKTHTCPPCPAPPVAGPSVFLFPPKPKDTLMISRTPEVTCVVVDVKHEDPEVKFNWYVDGVEVHNAKTKPREEQYNSTYRVVSVLTVLHQDWLNGKEYKCKVSNKALPAPIEKTISKAKGQPREPQVYTLPPSREQMTKNQVKLTCLVKGFYPSDIAVEWESNGQPENNYKTTPPVLDSDGSFFLYSKLTVDKSRWQQGNVFSCSVMHEALHNHYTQKSLSLSPGK

SEQ ID NO: 485 - protein, 214 aa, Artificial Sequence; identical to SEQ ID NO: 344
  Description of Artificial Sequence: Synthetic polypeptide
  XENP32948 Chain 3 - MESO-C[MSLN]_L1.9 Light Chain

SEQ ID NO: 486 - protein, 449 aa, Artificial Sequence; identical to SEQ ID NO: 357
  Description of Artificial Sequence: Synthetic polypeptide
  XENP32949 Chain 1 - MESO-C[MSLN]_H1.13_IgG1_pI(-)_Isosteric _A_/PVA_/S267K/L368D/K370S

SEQ ID NO: 487 - protein, 722 aa, Artificial Sequence
  Description of Artificial Sequence: Synthetic polypeptide
  XENP32949 Chain 2 - MESO-C[MSLN]_H1.13_(G4S)2_[CD3]_L1.47_H 1.32_scFv(GKPGS)4_Fc(216)_IgG1_C220S/PVA_/S267K/S364K/E357Q
QVQLVQSGAEVKKPGASVKVSCKASGYTFTSYWMHWVRQAPGQGLEWMGMIHPNSDNTIYYYKFQGRVTMTVDKSISTAYMELSRLRSDDTAVYYCAIIITPVVPKFDYWGQGTLVTVSSASTKGPSVFPLAPSSKSTSGGTAALGCLVKDYFPEPVTVSWNSGALTSGVHTFPAVLQSSGLYSLSSVVTVPSSSLGTQTYICNVNHKPSNTKVDKKVEPKSCGGGGSGGGGSQAVVTQEPSLTVSPGGTVTLTCGSSTGAVTTSNYANWVQQKPGKSPRGLIGGTNKRAPGVPARFSGSLLGGKAALTISGAQPEDEADYYCALWYSNHWVFGGGTKLTVLGKPGSGKPGSGKPGSGKPGSEVQLVESGGGLVQPGGSLRLSCAASGFTFSTYAMNWVRQAPGKGLEWVGRIRSKANNYATYYADSVKGRFTISRDDSKNTLYLQMNSLRAEDTAVYYCVRHGNFGDSYVSWFAYWGQGTLVTVSSGGGGSGGGGSKTHTCPPCPAPPVAGPSVFLFPPKPKDTLMISRTPEVTCVVVDVKHEDPEVKFNWYVDGVEVHNAKTKPREEQYNSTYRVVSVLTVLHQDWLNGKEYKCKVSNKALPAPIEKTISKAKGQPREPQVYTLPPSREQMTKNQVKLTCLVKGFYPSDIAVEWESNGQPENNYKTTPPVLDSDGSFFLYSKLTVDKSRWQQGNVFSCSVMHEALHNHYTQKSLSLSPGK

SEQ ID NO: 488 - protein, 214 aa, Artificial Sequence; identical to SEQ ID NO: 344
  Description of Artificial Sequence: Synthetic polypeptide
  XENP32949 Chain 3 - MESO-C[MSLN]_L1.9 Light Chain

SEQ ID NO: 489 - protein, 449 aa, Artificial Sequence; identical to SEQ ID NO: 297
  Description of Artificial Sequence: Synthetic polypeptide
  XENP32950 Chain 1 - MESO-C[MSLN]_H1.3_IgG1_pI(-)_Isosteric_ A_/PVA_/S267K/L368D/K370S

SEQ ID NO: 490 - protein, 722 aa, Artificial Sequence; identical to SEQ ID NO: 481
  Description of Artificial Sequence: Synthetic polypeptide
  XENP32950 Chain 2 - MESO-C[MSLN]_H1.3_(G4S)2_[CD3]_L1.47_H1 .32_scFv(GKPGS)4_Fc(216)_IgG1_C220S/PVA_/S267K/S364K/E357Q

SEQ ID NO: 491 - protein, 214 aa, Artificial Sequence; identical to SEQ ID NO: 344
  Description of Artificial Sequence: Synthetic polypeptide
  XENP32950 Chain 3 - MESO-C[MSLN]_L1.9 Light Chain

SEQ ID NO: 492 - protein, 449 aa, Artificial Sequence; identical to SEQ ID NO: 297
  Description of Artificial Sequence: Synthetic polypeptide
  XENP32951 Chain 1 - MESO-C[MSLN]_H1.3_IgG1_pI(-)_Isosteric_ A_/PVA_/S267K/L368D/K370S

SEQ ID NO: 493 - protein, 722 aa, Artificial Sequence; identical to SEQ ID NO: 481
  Description of Artificial Sequence: Synthetic polypeptide
  XENP32951 Chain 2 - MESO-C[MSLN]_H1.3_(G4S)2_[CD3]_L1.47_H1 .32_scFv(GKPGS)4_Fc(216)_IgG1_C220S/PVA_/S267K/S364K/E357Q

SEQ ID NO: 494 - protein, 214 aa, Artificial Sequence; identical to SEQ ID NO: 332
  Description of Artificial Sequence: Synthetic polypeptide
  XENP32951 Chain 3 - MESO-C[MSLN]_L1.5 Light Chain

SEQ ID NO: 495 - protein, 449 aa, Artificial Sequence; identical to SEQ ID NO: 297
  Description of Artificial Sequence: Synthetic polypeptide
  XENP33366 Chain 1 - MESO-C[MSLN]_H1.3_IgG1_pI(-)_Isosteric_ A_/PVA_/S267K/L368D/K370S

SEQ ID NO: 496 - protein, 722 aa, Artificial Sequence; identical to SEQ ID NO: 481
  Description of Artificial Sequence: Synthetic polypeptide
  XENP33366 Chain 2 - MESO-C[MSLN]_H1.3_(G4S)2_[CD3]_L1.47_H1 .32_scFv(GKPGS)4_Fc(216)_IgG1_C220S/PVA_/S267K/S364K/E357Q

SEQ ID NO: 497 - protein, 214 aa, Artificial Sequence; identical to SEQ ID NO: 362
  Description of Artificial Sequence: Synthetic polypeptide
  XENP33366 Chain 3 - MESO-C[MSLN]_L1.13 Light Chain

SEQ ID NO: 498 - protein, 449 aa, Artificial Sequence; identical to SEQ ID NO: 297
  Description of Artificial Sequence: Synthetic polypeptide
  XENP33367 Chain 1 - MESO-C[MSLN]_H1.3_IgG1_pI(-)_Isosteric_ A_/PVA_/S267K/L368D/K370S

SEQ ID NO: 499 - protein, 722 aa, Artificial Sequence; identical to SEQ ID NO: 481
  Description of Artificial Sequence: Synthetic polypeptide
  XENP33367 Chain 2 - MESO-C[MSLN]_H1.3_(G4S)2_[CD3]_L1.47_H1 .32_scFv(GKPGS)4_Fc(216)_IgG1_C220S/PVA_/S267K/S364K/E357Q

SEQ ID NO: 500 - protein, 214 aa, Artificial Sequence; identical to SEQ ID NO: 365
  Description of Artificial Sequence: Synthetic polypeptide
  XENP33367 Chain 3 - MESO-C[MSLN]_L1.14 Light Chain

SEQ ID NO: 501 - protein, 449 aa, Artificial Sequence; identical to SEQ ID NO: 288
  Description of Artificial Sequence: Synthetic polypeptide
  XENP33460 Chain 1 - MESO-C[MSLN]_H1_IgG1_pI(-)_Isosteric_A_ /PVA_/S267K/L368D/K370S

SEQ ID NO: 502 - protein, 722 aa, Artificial Sequence; identical to SEQ ID NO: 466
  Description of Artificial Sequence: Synthetic polypeptide
  XENP33460 Chain 2 - MESO-C[MSLN]_H1_(G4S)2_[CD3]_L1.47_H1.3 2_scFv(GKPGS)4_Fc(216)_IgG1_C220S/PVA_/S267K/S364K/E357Q

SEQ ID NO: 503 - protein, 214 aa, Artificial Sequence
  Description of Artificial Sequence: Synthetic polypeptide
  XENP33460 Chain 3 - MESO-C[MSLN]_L1.19 Light Chain
DIVMTQSPDSLAVSLGERATINCKASHDVGTYVAWYQQKPGQSPKLLIYWASTRHTGVPDRFTGSGSGTDFTLTISSLQAEDVAVYFCQQYYSYPLTFGAGTKLEIKRTVAAPSVFIFPPSDEQLKSGTASVVCLLNNFYPREAKVQWKVDNALQSGNSQESVTEQDSKDSTYSLSSTLTLSKADYEKHKVYACEVTHQGLSSPVTKSFNRGEC

SEQ ID NO: 504 - protein, 449 aa, Artificial Sequence; identical to SEQ ID NO: 288
  Description of Artificial Sequence: Synthetic polypeptide
  XENP33461 Chain 1 - MESO-C[MSLN]_H1_IgG1_pI(-)_Isosteric_A_ /PVA_/S267K/L368D/K370S

SEQ ID NO: 505 - protein, 722 aa, Artificial Sequence; identical to SEQ ID NO: 466
  Description of Artificial Sequence: Synthetic polypeptide
  XENP33461 Chain 2 - MESO-C[MSLN]_H1_(G4S)2_[CD3]_L1.47_H1.3 2_scFv(GKPGS)4_Fc(216)_IgG1_C220S/PVA_/S267K/S364K/E357Q

SEQ ID NO: 506 - protein, 214 aa, Artificial Sequence; identical to SEQ ID NO: 386
  Description of Artificial Sequence: Synthetic polypeptide
  XENP33461 Chain 3 - MESO-C[MSLN]_L1.20 Light Chain

SEQ ID NO: 507 - protein, 449 aa, Artificial Sequence; identical to SEQ ID NO: 288
  Description of Artificial Sequence: Synthetic polypeptide
  XENP33462 Chain 1 - MESO-C[MSLN]_H1_IgG1_pI(-)_Isosteric_A_ /PVA_/S267K/L368D/K370S

SEQ ID NO: 508 - protein, 722 aa, Artificial Sequence; identical to SEQ ID NO: 466
  Description of Artificial Sequence: Synthetic polypeptide
  XENP33462 Chain 2 - MESO-C[MSLN]_H1_(G4S)2_[CD3]_L1.47_H1.3 2_scFv(GKPGS)4_Fc(216)_IgG1_C220S/PVA_/S267K/S364K/E357Q

SEQ ID NO: 509 - protein, 214 aa, Artificial Sequence
  Description of Artificial Sequence: Synthetic polypeptide
  XENP33462 Chain 3 - MESO-C[MSLN]_L1.21 Light Chain
DIVMTQSPDSLAVSLGERATINCKASHDVGTSVAWYQQKPGQSPKLLIYWASTRHTGVPDRFTGSGSGTDFTLTISSLQAEDVAVYFCQQYYSVPLTFGAGTKLEIKRTVAAPSVFIFPPSDEQLKSGTASVVCLLNNFYPREAKVQWKVDNALQSGNSQESVTEQDSKDSTYSLSSTLTLSKADYEKHKVYACEVTHQGLSSPVTKSFNRGEC

SEQ ID NO: 510 - protein, 449 aa, Artificial Sequence; identical to SEQ ID NO: 288
  Description of Artificial Sequence: Synthetic polypeptide
  XENP33463 Chain 1 - MESO-C[MSLN]_H1_IgG1_pI(-)_Isosteric_A_ /PVA_/S267K/L368D/K370S

SEQ ID NO: 511 - protein, 722 aa, Artificial Sequence; identical to SEQ ID NO: 466
  Description of Artificial Sequence: Synthetic polypeptide
  XENP33463 Chain 2 - MESO-C[MSLN]_H1_(G4S)2_[CD3]_L1.47_H1.3 2_scFv(GKPGS)4_Fc(216)_IgG1_C220S/PVA_/S267K/S364K/E357Q

SEQ ID NO: 512 - protein, 214 aa, Artificial Sequence
  Description of Artificial Sequence: Synthetic polypeptide
  XENP33463 Chain 3 - MESO-C[MSLN]_L1.22 Light Chain
DIVMTQSPDSLAVSLGERATINCKASHDVGTSVAWYQQKPGQSPKLLIYWASTRHTGVPDRFTGSGSGTDFTLTISSLQAEDVAVYFCQQYYSIPLTFGAGTKLEIKRTVAAPSVFIFPPSDEQLKSGTASVVCLLNNFYPREAKVQWKVDNALQSGNSQESVTEQDSKDSTYSLSSTLTLSKADYEKHKVYACEVTHQGLSSPVTKSFNRGEC

SEQ ID NO: 513 - protein, 449 aa, Artificial Sequence; identical to SEQ ID NO: 354
  Description of Artificial Sequence: Synthetic polypeptide
  XENP33464 Chain 1 - MESO-C[MSLN]_H1.12_IgG1_pI(-)_Isosteric _A_/PVA_/S267K/L368D/K370S

SEQ ID NO: 514 - protein, 722 aa, Artificial Sequence; identical to SEQ ID NO: 484
  Description of Artificial Sequence: Synthetic polypeptide
  XENP33464 Chain 2 - MESO-C[MSLN]_H1.12_(G4S)2_[CD3]_L1.47_H 1.32_scFv(GKPGS)4_Fc(216)_IgG1_C220S/PVA_/S267K/S364K/E357Q

SEQ ID NO: 515 - protein, 214 aa, Artificial Sequence; identical to SEQ ID NO: 503
  Description of Artificial Sequence: Synthetic polypeptide
  XENP33464 Chain 3 - MESO-C[MSLN]_L1.19 Light Chain

SEQ ID NO: 516 - protein, 449 aa, Artificial Sequence; identical to SEQ ID NO: 354
  Description of Artificial Sequence: Synthetic polypeptide
  XENP33465 Chain 1 - MESO-C[MSLN]_H1.12_IgG1_pI(-)_Isosteric _A_/PVA_/S267K/L368D/K370S

SEQ ID NO: 517 - protein, 722 aa, Artificial Sequence; identical to SEQ ID NO: 484
  Description of Artificial Sequence: Synthetic polypeptide
  XENP33465 Chain 2 - MESO-C[MSLN]_H1.12_(G4S)2_[CD3]_L1.47_H 1.32_scFv(GKPGS)4_Fc(216)_IgG1_C220S/PVA_/S267K/S364K/E357Q

SEQ ID NO: 518 - protein, 214 aa, Artificial Sequence; identical to SEQ ID NO: 386
  Description of Artificial Sequence: Synthetic polypeptide
  XENP33465 Chain 3 - MESO-C[MSLN]_L1.20 Light Chain

SEQ ID NO: 519 - protein, 449 aa, Artificial Sequence; identical to SEQ ID NO: 354
  Description of Artificial Sequence: Synthetic polypeptide
  XENP33466 Chain 1 - MESO-C[MSLN]_H1.12_IgG1_pI(-)_Isosteric _A_/PVA_/S267K/L368D/K370S

SEQ ID NO: 520 - protein, 722 aa, Artificial Sequence; identical to SEQ ID NO: 484
  Description of Artificial Sequence: Synthetic polypeptide
  XENP33466 Chain 2 - MESO-C[MSLN]_H1.12_(G4S)2_[CD3]_L1.47_H 1.32_scFv(GKPGS)4_Fc(216)_IgG1_C220S/PVA_/S267K/S364K/E357Q

SEQ ID NO: 521 - protein, 214 aa, Artificial Sequence; identical to SEQ ID NO: 509
  Description of Artificial Sequence: Synthetic polypeptide
  XENP33466 Chain 3 - MESO-C[MSLN]_L1.21 Light Chain

SEQ ID NO: 522 - protein, 449 aa, Artificial Sequence; identical to SEQ ID NO: 354
  Description of Artificial Sequence: Synthetic polypeptide
  XENP33467 Chain 1 - MESO-C[MSLN]_H1.12_IgG1_pI(-)_Isosteric _A_/PVA_/S267K/L368D/K370S

SEQ ID NO: 523 - protein, 722 aa, Artificial Sequence; identical to SEQ ID NO: 484
  Description of Artificial Sequence: Synthetic polypeptide
  XENP33467 Chain 2 - MESO-C[MSLN]_H1.12_(G4S)2_[CD3]_L1.47_H 1.32_scFv(GKPGS)4_Fc(216)_IgG1_C220S/PVA_/S267K/S364K/E357Q

SEQ ID NO: 524 - protein, 214 aa, Artificial Sequence; identical to SEQ ID NO: 512
  Description of Artificial Sequence: Synthetic polypeptide
  XENP33467 Chain 3 - MESO-C[MSLN]_L1.22 Light Chain

SEQ ID NO: 525 - protein, 449 aa, Artificial Sequence; identical to SEQ ID NO: 399
  Description of Artificial Sequence: Synthetic polypeptide
  XENP3396 Chain 1 - MESO-C[MSLN]_H1.14_IgG1_pI(-)_Isosteric_ A_PVA_/S267K/L368D/K370S-(G4S)2_IgG1_PVA_/S267K/S364K/E357Q

SEQ ID NO: 526 - protein, 722 aa, Artificial Sequence
  Description of Artificial Sequence: Synthetic polypeptide
  XENP3396 Chain 2 - MESO-C[MSLN]_H1.14_(G4S)2_[CD3]_(G4S)2_I gG1_PVA_/S267K/S364K/E357Q
QVQLVQSGAEVKKPGASVKVSCKASGYTFTSYWMHWVRQAPGQGLEWMGWIHPQSDNTIYYEKFQGRVTMTVDKSISTAYMELSRLRSDDTAVYYCAIIITPVVPKFDYWGQGTLVTVSSASTKGPSVFPLAPSSKSTSGGTAALGCLVKDYFPEPVTVSWNSGALTSGVHTFPAVLQSSGLYSLSSVVTVPSSSLGTQTYICNVNHKPSNTKVDKKVEPKSCGGGGSGGGGSQAVVTQEPSLTVSPGGTVTLTCGSSTGAVTTSNYANWVQQKPGKSPRGLIGGTNKRAPGVPARFSGSLLGGKAALTISGAQPEDEADYYCALWYSNHWVFGGGTKLTVLGKPGSGKPGSGKPGSGKPGSEVQLVESGGGLVQPGGSLRLSCAASGFTFSTYAMNWVRQAPGKGLEWVGRIRSKANNYATYYADSVKGRFTISRDDSKNTLYLQMNSLRAEDTAVYYCVRHGNFGDSYVSWFAYWGQGTLVTVSSGGGGSGGGGSKTHTCPPCPAPPVAGPSVFLFPPKPKDTLMISRTPEVTCVVVDVKHEDPEVKFNWYVDGVEVHNAKTKPREEQYNSTYRVVSVLTVLHQDWLNGKEYKCKVSNKALPAPIEKTISKAKGQPREPQVYTLPPSREQMTKNQVKLTCLVKGFYPSDIAVEWESNGQPENNYKTTPPVLDSDGSFFLYSKLTVDKSRWQQGNVFSCSVMHEALHNHYTQKSLSLSPGK

SEQ ID NO: 527 - protein, 214 aa, Artificial Sequence; identical to SEQ ID NO: 365
  Description of Artificial Sequence: Synthetic polypeptide
  XENP3396 Chain 3 - MESO-C[MSLN]_L1.14 Light Chain

SEQ ID NO: 528 - protein, 449 aa, Artificial Sequence; identical to SEQ ID NO: 402
  Description of Artificial Sequence: Synthetic polypeptide
  XENP33970 Chain 1 - MESO-C[MSLN]_H1.15_IgG1_pI(-)_Isosteric _A_PVA_/S267K/L368D/K370S-(G4S)2_IgG1_PVA_/S267K/S364K/E357Q

SEQ ID NO: 529 - protein, 722 aa, Artificial Sequence
  Description of Artificial Sequence: Synthetic polypeptide
  XENP33970 Chain 2 - MESO-C[MSLN]_H1.15_(G4S)2_[CD3]_(G4S)2_ IgG1_PVA_/S267K/S364K/E357Q
QVQLVQSGAEVKKPGASVKVSCKASGYTFTSYWMHWVRQAPGQGLEWMGWIHPNSDNTIYYEKFQGRVTMTVDKSISTAYMELSRLRSDDTAVYYCARIITPVVPKFDYWGQGTLVTVSSASTKGPSVFPLAPSSKSTSGGTAALGCLVKDYFPEPVTVSWNSGALTSGVHTFPAVLQSSGLYSLSSVVTVPSSSLGTQTYICNVNHKPSNTKVDKKVEPKSCGGGGSGGGGSQAVVTQEPSLTVSPGGTVTLTCGSSTGAVTTSNYANWVQQKPGKSPRGLIGGTNKRAPGVPARFSGSLLGGKAALTISGAQPEDEADYYCALWYSNHWVFGGGTKLTVLGKPGSGKPGSGKPGSGKPGSEVQLVESGGGLVQPGGSLRLSCAASGFTFSTYAMNWVRQAPGKGLEWVGRIRSKANNYATYYADSVKGRFTISRDDSKNTLYLQMNSLRAEDTAVYYCVRHGNFGDSYVSWFAYWGQGTLVTVSSGGGGSGGGGSKTHTCPPCPAPPVAGPSVFLFPPKPKDTLMISRTPEVTCVVVDVKHEDPEVKFNWYVDGVEVHNAKTKPREEQYNSTYRVVSVLTVLHQDWLNGKEYKCKVSNKALPAPIEKTISKAKGQPREPQVYTLPPSREQMTKNQVKLTCLVKGFYPSDIAVEWESNGQPENNYKTTPPVLDSDGSFFLYSKLTVDKSRWQQGNVFSCSVMHEALHNHYTQKSLSLSPGK

SEQ ID NO: 530 - protein, 214 aa, Artificial Sequence; identical to SEQ ID NO: 365
  Description of Artificial Sequence: Synthetic polypeptide
  XENP33970 Chain 3 - MESO-C[MSLN]_L1.14 Light Chain

SEQ ID NO: 531 - protein, 449 aa, Artificial Sequence; identical to SEQ ID NO: 405
  Description of Artificial Sequence: Synthetic polypeptide
  XENP33972 Chain 1 - MESO-C[MSLN]_H1.16_IgG1_pI(-)_Isosteric _A_PVA_/S267K/L368D/K370S-(G4S)2_IgG1_PVA_/S267K/S364K/E357Q

SEQ ID NO: 532 - protein, 722 aa, Artificial Sequence
  Description of Artificial Sequence: Synthetic polypeptide
  XENP33972 Chain 2 - MESO-C[MSLN]_H1.16_(G4S)2_[CD3]_(G4S)2_ IgG1_PVA_/S267K/S364K/E357Q
QVQLVQSGAEVKKPGASVKVSCKASGYTFTSYWMHWVRQAPGQGLEWMGWIHPQSDNTIYYEKFQGRVTMTVDKSISTAYMELSRLRSDDTAVYYCARIITPVVPKFDYWGQGTLVTVSSASTKGPSVFPLAPSSKSTSGGTAALGCLVKDYFPEPVTVSWNSGALTSGVHTFPAVLQSSGLYSLSSVVTVPSSSLGTQTYICNVNHKPSNTKVDKKVEPKSCGGGGSGGGGSQAVVTQEPSLTVSPGGTVTLTCGSSTGAVTTSNYANWVQQKPGKSPRGLIGGTNKRAPGVPARFSGSLLGGKAALTISGAQPEDEADYYCALWYSNHWVFGGGTKLTVLGKPGSGKPGSGKPGSGKPGSEVQLVESGGGLVQPGGSLRLSCAASGFTFSTYAMNWVRQAPGKGLEWVGRIRSKANNYATYYADSVKGRFTISRDDSKNTLYLQMNSLRAEDTAVYYCVRHGNFGDSYVSWFAYWGQGTLVTVSSGGGGSGGGGSKTHTCPPCPAPPVAGPSVFLFPPKPKDTLMISRTPEVTCVVVDVKHEDPEVKFNWYVDGVEVHNAKTKPREEQYNSTYRVVSVLTVLHQDWLNGKEYKCKVSNKALPAPIEKTISKAKGQPREPQVYTLPPSREQMTKNQVKLTCLVKGFYPSDIAVEWESNGQPENNYKTTPPVLDSDGSFFLYSKLTVDKSRWQQGNVFSCSVMHEALHNHYTQKSLSLSPGK

SEQ ID NO: 533 - protein, 214 aa, Artificial Sequence; identical to SEQ ID NO: 365
  Description of Artificial Sequence: Synthetic polypeptide
  XENP33972 Chain 3 - MESO-C[MSLN]_L1.14 Light Chain

SEQ ID NO: 534 - protein, 449 aa, Artificial Sequence
  Description of Artificial Sequence: Synthetic polypeptide
  XENP34155 Chain 1 - MESO-C[MSLN]_H1.3_IgG1_pI(-)_Isosteric_ A_/PVA_/S267K/L368D/K370S/M248L/N434S
QVQLVQSGAEVKKPGASVKVSCKASGYTFTSYWMHWVRQAPGQGLEWMGWIHPNSDNTIYYEKFQGRVTMTVDKSISTAYMELSRLRSDDTAVYYCAIIITPVVPKFDYWGQGTLVTVSSASTKGPSVFPLAPSSKSTSGGTAALGCLVKDYFPEPVTVSWNSGALTSGVHTFPAVLQSSGLYSLSSVVTVPSSSLGTQTYICNVNHKPSDTKVDKKVEPKSCDKTHTCPPCPAPPVAGPSVFLFPPKPKDTLMISRTPEVTCVVVDVKHEDPEVKFNWYVDGVEVHNAKTKPREEEYNSTYRVVSVLTVLHQDWLNGKEYKCKVSNKALPAPIEKTISKAKGQPREPQVYTLPPSREEMTKNQVSLTCDVSGFYPSDIAVEWESDGQPENNYKTTPPVLDSDGSFFLYSKLTVDKSRWEQGDVFSCSVLHEALHSHYTQKSLSLSPGK

SEQ ID NO: 535 - protein, 722 aa, Artificial Sequence
  Description of Artificial Sequence: Synthetic polypeptide
  XENP34155 Chain 2 - MESO-C[MSLN]_H1.3_(G4S)2_[CD3]_L1.47_H1 .32_scFv(GKPGS)4_Fc(216)_IgG1_C220S/PVA_/S267K/S364K/E357Q/ M248L/N434S
QVQLVQSGAEVKKPGASVKVSCKASGYTFTSYWMHWVRQAPGQGLEWMGWIHPNSDNTIYYEKFQGRVTMTVDKSISTAYMELSRLRSDDTAVYYCAIIITPVVPKFDYWGQGTLVTVSSASTKGPSVFPLAPSSKSTSGGTAALGCLVKDYFPEPVTVSWNSGALTSGVHTFPAVLQSSGLYSLSSVVTVPSSSLGTQTYICNVNHKPSNTKVDKKVEPKSCGGGGSGGGGSQAVVTQEPSLTVSPGGTVTLTCGSSTGAVTTSNYANWVQQKPGKSPRGLIGGTNKRAPGVPARFSGSLLGGKAALTISGAQPEDEADYYCALWYSNHWVFGGGTKLTVLGKPGSGKPGSGKPGSGKPGSEVQLVESGGGLVQPGGSLRLSCAASGFTFSTYAMNWVRQAPGKGLEWVGRIRSKANNYATYYADSVKGRFTISRDDSKNTLYLQMNSLRAEDTAVYYCVRHGNFGDSYVSWFAYWGQGTLVTVSSGGGGSGGGGSKTHTCPPCPAPPVAGPSVFLFPPKPKDTLMISRTPEVTCVVVDVKHEDPEVKFNWYVDGVEVHNAKTKPREEQYNSTYRVVSVLTVLHQDWLNGKEYKCKVSNKALPAPIEKTISKAKGQPREPQVYTLPPSREQMTKNQVKLTCLVKGFYPSDIAVEWESNGQPENNYKTTPPVLDSDGSFFLYSKLTVDKSRWQQGNVFSCSVLHEALHSHYTQKSLSLSPGK

SEQ ID NO: 536 - protein, 214 aa, Artificial Sequence; identical to SEQ ID NO: 365
  Description of Artificial Sequence: Synthetic polypeptide
  XENP34155 Chain 3 - MESO-C[MSLN]_L1.14 Light Chain

SEQ ID NO: 537 - protein, 449 aa, Artificial Sequence; identical to SEQ ID NO: 534
  Description of Artificial Sequence: Synthetic polypeptide
  XENP34156 Chain 1 - MESO-C[MSLN]_H1.3_IgG1_pI(-)_Isosteric_ A_/PVA_/S267K/L368D/K370S/M248L/N434S

SEQ ID NO: 538 - protein, 722 aa, Artificial Sequence; identical to SEQ ID NO: 535
  Description of Artificial Sequence: Synthetic polypeptide
  XENP34156 Chain 2 - MESO-C[MSLN]_H1.3_(G4S)2_[CD3]_L1.47_H1 .32_scFv(GKPGS)4_Fc(216)_IgG1_C220S/PVA_/S267K/S364K/E357Q/ M248L/N434S

SEQ ID NO: 539 - protein, 214 aa, Artificial Sequence; identical to SEQ ID NO: 362
  Description of Artificial Sequence: Synthetic polypeptide
  XENP34156 Chain 3 - MESO-C[MSLN]_L1.13 Light Chain

SEQ ID NO: 540 - protein, 449 aa, Artificial Sequence; identical to SEQ ID NO: 534
  Description of Artificial Sequence: Synthetic polypeptide
  XENP34157 Chain 1 - MESO-C[MSLN]_H1.3_IgG1_pI(-)_Isosteric_ A_/PVA_/S267K/L368D/K370S/M248L/N434S

SEQ ID NO: 541 - protein, 722 aa, Artificial Sequence; identical to SEQ ID NO: 535
  Description of Artificial Sequence: Synthetic polypeptide
  XENP34157 Chain 2 - MESO-C[MSLN]_H1.3_(G4S)2_[CD3]_L1.47_H1 .32_scFv(GKPGS)4_Fc(216)_IgG1_C220S/PVA_/S267K/S364K/E357Q/ M248L/N434S

SEQ ID NO: 542 - protein, 214 aa, Artificial Sequence; identical to SEQ ID NO: 250
  Description of Artificial Sequence: Synthetic polypeptide
  XENP34157 Chain 3 - MESO-C[MSLN]_L1 Light Chain

SEQ ID NO: 543 - protein, 449 aa, Artificial Sequence
  Description of Artificial Sequence: Synthetic polypeptide
  XENP34158 Chain 1 - MESO-C[MSLN]_H1.12_IgG1_pI(-)_Isosteric _A_/PVA_/S267K/L368D/K370S/M248L/N434S
QVQLVQSGAEVKKPGASVKVSCKASGYTFTSYWMHWVRQAPGQGLEWMGMIHPNSDNTIYYQKFQGRVTMTVDKSISTAYMELSRLRSDDTAVYYCAIIITPVVPKFDYWGQGTLVTVSSASTKGPSVFPLAPSSKSTSGGTAALGCLVKDYFPEPVTVSWNSGALTSGVHTFPAVLQSSGLYSLSSVVTVPSSSLGTQTYICNVNHKPSDTKVDKKVEPKSCDKTHTCPPCPAPPVAGPSVFLFPPKPKDTLMISRTPEVTCVVVDVKHEDPEVKFNWYVDGVEVHNAKTKPREEEYNSTYRVVSVLTVLHQDWLNGKEYKCKVSNKALPAPIEKTISKAKGQPREPQVYTLPPSREEMTKNQVSLTCDVSGFYPSDIAVEWESDGQPENNYKTTPPVLDSDGSFFLYSKLTVDKSRWEQGDVFSCSVLHEALHSHYTQKSLSLSPGK

SEQ ID NO: 544 - protein, 722 aa, Artificial Sequence
  Description of Artificial Sequence: Synthetic polypeptide
  XENP34158 Chain 2 - MESO-C[MSLN]_H1.12_(G4S)2_[CD3]_L1.47_H 1.32_scFv(GKPGS)4_Fc(216)_IgG1_C220S/PVA_/S267K/S364K/E357Q /M248L/N434S
QVQLVQSGAEVKKPGASVKVSCKASGYTFTSYWMHWVRQAPGQGLEWMGMIHPNSDNTIYYQKFQGRVTMTVDKSISTAYMELSRLRSDDTAVYYCAIIITPVVPKFDYWGQGTLVTVSSASTKGPSVFPLAPSSKSTSGGTAALGCLVKDYFPEPVTVSWNSGALTSGVHTFPAVLQSSGLYSLSSVVTVPSSSLGTQTYICNVNHKPSNTKVDKKVEPKSCGGGGSGGGGSQAVVTQEPSLTVSPGGTVTLTCGSSTGAVTTSNYANWVQQKPGKSPRGLIGGTNKRAPGVPARFSGSLLGGKAALTISGAQPEDEADYYCALWYSNHWVFGGGTKLTVLGKPGSGKPGSGKPGSGKPGSEVQLVESGGGLVQPGGSLRLSCAASGFTFSTYAMNWVRQAPGKGLEWVGRIRSKANNYATYYADSVKGRFTISRDDSKNTLYLQMNSLRAEDTAVYYCVRHGNFGDSYVSWFAYWGQGTLVTVSSGGGGSGGGGSKTHTCPPCPAPPVAGPSVFLFPPKPKDTLMISRTPEVTCVVVDVKHEDPEVKFNWYVDGVEVHNAKTKPREEQYNSTYRVVSVLTVLHQDWLNGKEYKCKVSNKALPAPIEKTISKAKGQPREPQVYTLPPSREQMTKNQVKLTCLVKGFYPSDIAVEWESNGQPENNYKTTPPVLDSDGSFFLYSKLTVDKSRWQQGNVFSCSVLHEALHSHYTQKSLSLSPGK

SEQ ID NO: 545 - protein, 214 aa, Artificial Sequence; identical to SEQ ID NO: 344
  Description of Artificial Sequence: Synthetic polypeptide
  XENP34158 Chain 3 - MESO-C[MSLN]_L1.9 Light Chain

SEQ ID NO: 546 - protein, 453 aa, Artificial Sequence; identical to SEQ ID NO: 229
  Description of Artificial Sequence: Synthetic polypeptide
  XENP31455 Chain 1 - MESO-A[MSLN]_H1.1_IgG1_pI(-)_Isosteric_ A_/PVA_/S267K/L368D/K370S

SEQ ID NO: 547 - protein, 726 aa, Artificial Sequence
  Description of Artificial Sequence: Synthetic polypeptide
  XENP31455 Chain 2 - MESO-A[MSLN]_H1.1_(G4S)2_[CD3]_(G4S)2_I gG1_C220S/PVA_/S267K/S364K/E357Q
EVQLVESGGGLVQPGGSLKLSCAASGFDFSRYWMSWVRQAPGKGLEWVSEINPDSSTIVYTPSVKGRFTISRDNAKNSLYLQMNSLRAEDTAVYYCARRGSHYYGYRTGYFDVWGAGTTVTVSSASTKGPSVFPLAPSSKSTSGGTAALGCLVKDYFPEPVTVSWNSGALTSGVHTFPAVLQSSGLYSLSSVVTVPSSSLGTQTYICNVNHKPSNTKVDKKVEPKSCGGGGSGGGGSQAVVTQEPSLTVSPGGTVTLTCGSSTGAVTTSNYANWVQQKPGKSPRGLIGGTNKRAPGVPARFSGSLLGGKAALTISGAQPEDEADYYCALWYSNHWVFGGGTKLTVLGKPGSGKPGSGKPGSGKPGSEVQLVESGGGLVQPGGSLRLSCAASGFTFSTYAMNWVRQAPGKGLEWVGRIRSKYNNYATYYADSVKGRFTISRDDSKNTLYLQMNSLRAEDTAVYYCVRHGNFGDEYVSWFAYWGQGTLVTVSSGGGGSGGGGSKTHTCPPCPAPPVAGPSVFLFPPKPKDTLMISRTPEVTCVVVDVKHEDPEVKFNWYVDGVEVHNAKTKPREEQYNSTYRVVSVLTVLHQDWLNGKEYKCKVSNKALPAPIEKTISKAKGQPREPQVYTLPPSREQMTKNQVKLTCLVKGFYPSDIAVEWESNGQPENNYKTTPPVLDSDGSFFLYSKLTVDKSRWQQGNVFSCSVMHEALHNHYTQKSLSLSPGK

SEQ ID NO: 548 - protein, 213 aa, Artificial Sequence; identical to SEQ ID NO: 226
  Description of Artificial Sequence: Synthetic polypeptide
  XENP31455 Chain 3 - MESO-A[MSLN]_L1 Light Chain

SEQ ID NO: 549 - protein, 452 aa, Artificial Sequence; identical to SEQ ID NO: 285
  Description of Artificial Sequence: Synthetic polypeptide
  XENP31456 Chain 1 - MESO-B[MSLN]_H0_IgG1_pI(-)_Isosteric_A_ /PVA_/S267K/L368D/K370S

SEQ ID NO: 550 - protein, 725 aa, Artificial Sequence
  Description of Artificial Sequence: Synthetic polypeptide
  XENP31456 Chain 2 - MESO-B[MSLN]_H0_(G4S)2_[CD3]_(G4S)2_IgG 1_C220S/PVA_/S267K/S364K/E357Q
QVQLQQSGPGLVTPSQTLSLTCAISGDSVSSNSATWNWIRQSPSRGLEWLGRTYYRSKWYNDYAVSVKSRMSINPDTSKNQFSLQLNSVTPEDTAVYYCARGMMTYYYGMDVWGQGTTVTVSSASTKGPSVFPLAPSSKSTSGGTAALGCLVKDYFPEPVTVSWNSGALTSGVHTFPAVLQSSGLYSLSSVVTVPSSSLGTQTYICNVNHKPSNTKVDKKVEPKSCGGGGSGGGGSQAVVTQEPSLTVSPGGTVTLTCGSSTGAVTTSNYANWVQQKPGKSPRGLIGGTNKRAPGVPARFSGSLLGGKAALTISGAQPEDEADYYCALWYSNHWVFGGGTKLTVLGKPGSGKPGSGKPGSGKPGSEVQLVESGGGLVQPGGSLRLSCAASGFTFSTYAMNWVRQAPGKGLEWVGRIRSKYNNYATYYADSVKGRFTISRDDSKNTLYLQMNSLRAEDTAVYYCVRHGNFGDEYVSWFAYWGQGTLVTVSSGGGGSGGGGSKTHTCPPCPAPPVAGPSVFLFPPKPKDTLMISRTPEVTCVVVDVKHEDPEVKFNWYVDGVEVHNAKTKPREEQYNSTYRVVSVLTVLHQDWLNGKEYKCKVSNKALPAPIEKTISKAKGQPREPQVYTLPPSREQMTKNQVKLTCLVKGFYPSDIAVEWESNGQPENNYKTTPPVLDSDGSFFLYSKLTVDKSRWQQGNVFSCSVMHEALHNHYTQKSLSLSPGK

SEQ ID NO: 551 - protein, 221 aa, Artificial Sequence; identical to SEQ ID NO: 240
  Description of Artificial Sequence: Synthetic polypeptide
  XENP31456 Chain 3 - MESO-B[MSLN]_L0 Light Chain

SEQ ID NO: 552 - protein, 453 aa, Artificial Sequence; identical to SEQ ID NO: 229
  Description of Artificial Sequence: Synthetic polypeptide
  XENP32249 Chain 1 - MESO-A[MSLN]_H1.1_IgG1_pI(-)_Isosteric_ A_/PVA_/S267K/L368D/K370S

SEQ ID NO: 553 - protein, 722 aa, Artificial Sequence
  Description of Artificial Sequence: Synthetic polypeptide
  XENP32249 Chain 2 - MESO-A[MSLN]_H1.1_(G4S)2_[CD3]_L1.47_H1 .89_scFv(GKPGS)4_Fc(216)_IgG1_C220S/PVA_/S267K/S364K/E357Q
EVQLVESGGGLVQPGGSLKLSCAASGFDFSRYWMSWVRQAPGKGLEWVSEINPDSSTIVYTPSVKGRFTISRDNAKNSLYLQMNSLRAEDTAVYYCARRGSHYYGYRTGYFDVWGAGTTVTVSSASTKGPSVFPLAPSSKSTSGGTAALGCLVKDYFPEPVTVSWNSGALTSGVHTFPAVLQSSGLYSLSSVVTVPSSSLGTQTYICNVNHKPSNTKVDKKVEPKSCGGGGSGGGGSQAVVTQEPSLTVSPGGTVTLTCGSSTGAVTTSNYANWVQQKPGKSPRGLIGGTNKRAPGVPARFSGSLLGGKAALTISGAQPEDEADYYCALWYSNHWVFGGGTKLTVLGKPGSGKPGSGKPGSGKPGSEVQLVESGGGLVQPGGSLRLSCAASGFTFSTYAMNWVRQAPGKGLEWVGRIRSKYNNYATYYADSVKGRFTISRDDSKNTLYLQMNSLRAEDTAVYYCVRHGNFGDEYVSWFAYWGQGTLVTVSSEPKSSDKTHTCPPCPAPPVAGPSVFLFPPKPKDTLMISRTPEVTCVVVDVKHEDPEVKFNWYVDGVEVHNAKTKPREEQYNSTYRVVSVLTVLHQDWLNGKEYKCKVSNKALPAPIEKTISKAKGQPREPQVYTLPPSREQMTKNQVKLTCLVKGFYPSDIAVEWESNGQPENNYKTTPPVLDSDGSFFLYSKLTVDKSRWQQGNVFSCSVMHEALHNHYTQKSLSLSPGK

SEQ ID NO: 554 - protein, 213 aa, Artificial Sequence; identical to SEQ ID NO: 226
  Description of Artificial Sequence: Synthetic polypeptide
  XENP32249 Chain 3 - MESO-A[MSLN]_L1 Light Chain

SEQ ID NO: 555 - protein, 452 aa, Artificial Sequence; identical to SEQ ID NO: 285
  Description of Artificial Sequence: Synthetic polypeptide
  XENP32250 Chain 1 - MESO-B[MSLN]_H0_IgG1_pI(-)_Isosteric_A_ /PVA_/S267K/L368D/K370S

SEQ ID NO: 556 - protein, 721 aa, Artificial Sequence
  Description of Artificial Sequence: Synthetic polypeptide
  XENP32250 Chain 2 - MESO-B[MSLN]_H0_(G4S)2_[CD3]_L1.47_H1.8 9_scFv(GKPGS)4_Fc(216)_IgG1_C220S/PVA_/S267K/S364K/E357Q
QVQLQQSGPGLVTPSQTLSLTCAISGDSVSSNSATWNWIRQSPSRGLEWLGRTYYRSKWYNDYAVSVKSRMSINPDTSKNQFSLQLNSVTPEDTAVYYCARGMMTYYYGMDVWGQGTTVTVSSASTKGPSVFPLAPSSKSTSGGTAALGCLVKDYFPEPVTVSWNSGALTSGVHTFPAVLQSSGLYSLSSVVTVPSSSLGTQTYICNVNHKPSNTKVDKKVEPKSCGGGGSGGGGSQAVVTQEPSLTVSPGGTVTLTCGSSTGAVTTSNYANWVQQKPGKSPRGLIGGTNKRAPGVPARFSGSLLGGKAALTISGAQPEDEADYYCALWYSNHWVFGGGTKLTVLGKPGSGKPGSGKPGSGKPGSEVQLVESGGGLVQPGGSLRLSCAASGFTFSTYAMNWVRQAPGKGLEWVGRIRSKYNNYATYYADSVKGRFTISRDDSKNTLYLQMNSLRAEDTAVYYCVRHGNFGDEYVSWFAYWGQGTLVTVSSEPKSSDKTHTCPPCPAPPVAGPSVFLFPPKPKDTLMISRTPEVTCVVVDVKHEDPEVKFNWYVDGVEVHNAKTKPREEQYNSTYRVVSVLTVLHQDWLNGKEYKCKVSNKALPAPIEKTISKAKGQPREPQVYTLPPSREQMTKNQVKLTCLVKGFYPSDIAVEWESNGQPENNYKTTPPVLDSDGSFFLYSKLTVDKSRWQQGNVFSCSVMHEALHNHYTQKSLSLSPGK

SEQ ID NO: 557 - protein, 221 aa, Artificial Sequence; identical to SEQ ID NO: 240
  Description of Artificial Sequence: Synthetic polypeptide
  XENP32250 Chain 3 - MESO-B[MSLN]_L0 Light Chain

SEQ ID NO: 558 - protein, 449 aa, Artificial Sequence; identical to SEQ ID NO: 288
  Description of Artificial Sequence: Synthetic polypeptide
  XENP32251 Chain 1 - MESO-C[MSLN]_H1_IgG1_pI(-)_Isosteric_A_ /PVA_/S267K/L368D/K370S

SEQ ID NO: 559 - protein, 718 aa, Artificial Sequence
  Description of Artificial Sequence: Synthetic polypeptide
  XENP32251 Chain 2 - MESO-C[MSLN]_H1_[CD3]_L1.47_H1.89_scFv( GKPGS)4_Fc(216)_IgG1_C220S/PVA_/S267K/S364K/E357Q
QVQLVQSGAEVKKPGASVKVSCKASGYTFTSYWMHWVRQAPGQGLEWMGMIHPNSDNTIYYEKFQGRVTMTVDKSISTAYMELSRLRSDDTAVYYCAIIITPVVPKFDYWGQGTLVTVSSASTKGPSVFPLAPSSKSTSGGTAALGCLVKDYFPEPVTVSWNSGALTSGVHTFPAVLQSSGLYSLSSVVTVPSSSLGTQTYICNVNHKPSNTKVDKKVEPKSCGGGGSGGGGSQAVVTQEPSLTVSPGGTVTLTCGSSTGAVTTSNYANWVQQKPGKSPRGLIGGTNKRAPGVPARFSGSLLGGKAALTISGAQPEDEADYYCALWYSNHWVFGGGTKLTVLGKPGSGKPGSGKPGSGKPGSEVQLVESGGGLVQPGGSLRLSCAASGFTFSTYAMNWVRQAPGKGLEWVGRIRSKYNNYATYYADSVKGRFTISRDDSKNTLYLQMNSLRAEDTAVYYCVRHGNFGDEYVSWFAYWGQGTLVTVSSEPKSSDKTHTCPPCPAPPVAGPSVFLFPPKPKDTLMISRTPEVTCVVVDVKHEDPEVKFNWYVDGVEVHNAKTKPREEQYNSTYRVVSVLTVLHQDWLNGKEYKCKVSNKALPAPIEKTISKAKGQPREPQVYTLPPSREQMTKNQVKLTCLVKGFYPSDIAVEWESNGQPENNYKTTPPVLDSDGSFFLYSKLTVDKSRWQQGNVFSCSVMHEALHNHYTQKSLSLSPGK

SEQ ID NO: 560 - protein, 214 aa, Artificial Sequence; identical to SEQ ID NO: 250
  Description of Artificial Sequence: Synthetic polypeptide
  XENP32251 Chain 3 - MESO-C[MSLN]_L1 Light Chain

SEQ ID NO: 561 - protein, 449 aa, Artificial Sequence; identical to SEQ ID NO: 288
  Description of Artificial Sequence: Synthetic polypeptide
  XENP32746 Chain 1 - MESO-C[MSLN]_H1_IgG1_pI(-)_Isosteric_A_ /PVA_/S267K/L368D/K370S

SEQ ID NO: 562 - protein, 718 aa, Artificial Sequence; identical to SEQ ID NO: 559
  Description of Artificial Sequence: Synthetic polypeptide
  XENP32746 Chain 2 - MESO-C[MSLN]_H1_(G4S)2_[CD3]_L1.47_H1.8 9_scFv(GKPGS)4_Fc(216)_IgG1_C220S/PVA_/S267K/S364K/E357Q

SEQ ID NO: 563 - protein, 214 aa, Artificial Sequence; identical to SEQ ID NO: 326
  Description of Artificial Sequence: Synthetic polypeptide
  XENP32746 Chain 3 - MESO-C[MSLN]_L1.3 Light Chain

SEQ ID NO: 564 - protein, 449 aa, Artificial Sequence; identical to SEQ ID NO: 288
  Description of Artificial Sequence: Synthetic polypeptide
  XENP32749 Chain 1 - MESO-C[MSLN]_H1_IgG1_pI(-)_Isosteric_A_ /PVA_/S267K/L368D/K370S

SEQ ID NO: 565 - protein, 718 aa, Artificial Sequence; identical to SEQ ID NO: 559
  Description of Artificial Sequence: Synthetic polypeptide
  XENP32749 Chain 2 - MESO C[MSLN]_H1_(G4S)2_[CD3]_L1.47_H1.8 9_scFv(GKPGS)4_Fc(216)_IgG1_C220S/PVA_/S267K/S364K/E357Q

SEQ ID NO: 566 - protein, 214 aa, Artificial Sequence; identical to SEQ ID NO: 329
  Description of Artificial Sequence: Synthetic polypeptide
  XENP32749 Chain 3 - MESO-C[MSLN]_L1.4 Light Chain

SEQ ID NO: 567 - protein, 449 aa, Artificial Sequence; identical to SEQ ID NO: 288
  Description of Artificial Sequence: Synthetic polypeptide
  XENP32752 Chain 1 - MESO-C[MSLN]_H1_IgG1_pI(-)_Isosteric_A_ /PVA_/S267K/L368D/K370S

SEQ ID NO: 568 - protein, 718 aa, Artificial Sequence; identical to SEQ ID NO: 559
  Description of Artificial Sequence: Synthetic polypeptide
  XENP32752 Chain 2 - MESO-C[MSLN]_H1_(G4S)2_[CD3]_L1.47_H1.8 9_scFv(GKPGS)4_Fc(216)_IgG1_C220S/PVA_/S267K/S364K/E357Q

SEQ ID NO: 569 - protein, 214 aa, Artificial Sequence; identical to SEQ ID NO: 332
  Description of Artificial Sequence: Synthetic polypeptide
  XENP32752 Chain 3 - MESO-C[MSLN]_L1.5 Light Chain

SEQ ID NO: 570 - protein, 449 aa, Artificial Sequence; identical to SEQ ID NO: 288
  Description of Artificial Sequence: Synthetic polypeptide
  XENP32853 Chain 1 - MESO-C[MSLN]_H1_IgG1_pI(-)_Isosteric_A_ /PVA_/S267K/L368D/K370S

SEQ ID NO: 571 - protein, 718 aa, Artificial Sequence; identical to SEQ ID NO: 559
  Description of Artificial Sequence: Synthetic polypeptide
  XENP32853 Chain 2 - MESO-C[MSLN]_H1_(G4S)2_[CD3]_L1.47_H1.8 9_scFv(GKPGS)4_Fc(216)_IgG1_C220S/PVA_/S267K/S364K/E357Q

SEQ ID NO: 572 - protein, 214 aa, Artificial Sequence; identical to SEQ ID NO: 344
  Description of Artificial Sequence: Synthetic polypeptide
  XENP32853 Chain 3 - MESO-C[MSLN]_L1.9 Light Chain

SEQ ID NO: 573 - protein, 718 aa, Artificial Sequence
  Description of Artificial Sequence: Synthetic polypeptide
  XENP33974 Chain 1 - MESO-C[MSLN]_H1.3_IgG1_pI(-)_Isosteric_ A_PVA_/S267K/L368D/K370S
QVQLVQSGAEVKKPGASVKVSCKASGYTFTSYWMHWVRQAPGQGLEWMGWIHPNSDNTIYYEKFQGRVTMTVDKSISTAYMELSRLRSDDTAVYYCAIIITPVVPKFDYWGQGTLVTVSSASTKGPSVFPLAPSSKSTSGGTAALGCLVKDYFPEPVTVSWNSGALTSGVHTFPAVLQSSGLYSLSSVVTVPSSSLGTQTYICNVNHKPSNTKVDKKVEPKSCGGGGSGGGGSQAVVTQEPSLTVSPGGTVTLTCGSSTGAVTTSNYANWVQQKPGKSPRGLIGGTNKRAPGVPARFSGSLLGGKAALTISGAQPEDEADYYCALWYSNHWVFGGGTKLTVLGKPGSGKPGSGKPGSGKPGSEVQLVESGGGLVQPGGSLRLSCAASGFTFSTYAMNWVRQAPGKGLEWVGRIRSKYNNYATYYADSVKGRFTISRDDSKNTLYLQMNSLRAEDTAVYYCVRHGNFGDEYVSWFAYWGQGTLVTVSSEPKSSDKTHTCPPCPAPPVAGPSVFLFPPKPKDTLMISRTPEVTCVVVDVKHEDPEVKFNWYVDGVEVHNAKTKPREEQYNSTYRVVSVLTVLHQDWLNGKEYKCKVSNKALPAPIEKTISKAKGQPREPQVYTLPPSREQMTKNQVKLTCLVKGFYPSDIAVEWESNGQPENNYKTTPPVLDSDGSFFLYSKLTVDKSRWQQGNVFSCSVMHEALHNHYTQKSLSLSPGK

SEQ ID NO: 574 - protein, 449 aa, Artificial Sequence; identical to SEQ ID NO: 297
  Description of Artificial Sequence: Synthetic polypeptide
  XENP33974 Chain 2 - MESO-C[MSLN]_H1.3_(G4S)2_[CD3]_L1.47_H1 .89_scFv(GKPGS)4_Fc(216)_IgG1_PVA_/S267K/S364K/E357Q

SEQ ID NO: 575 - protein, 214 aa, Artificial Sequence; identical to SEQ ID NO: 365
  Description of Artificial Sequence: Synthetic polypeptide
  XENP33974 Chain 3 - MESO-C[MSLN]_L1.14 Light Chain

SEQ ID NO: 576 - protein, 718 aa, Artificial Sequence; identical to SEQ ID NO: 559
  Description of Artificial Sequence: Synthetic polypeptide
  XENP33975 Chain 1 - MESO-C[MSLN]_H1_IgG1_pI(-)_Isosteric_A_ PVA_/S267K/L368D/K370S

SEQ ID NO: 577 - protein, 449 aa, Artificial Sequence; identical to SEQ ID NO: 288
  Description of Artificial Sequence: Synthetic polypeptide
  XENP33975 Chain 2 - MESO-C[MSLN]_H1_(G4S)2_[CD3]_L1.47_H1.8 9_scFv(GKPGS)4_Fc(216)_IgG1_PVA_/S267K/S364K/E357Q

SEQ ID NO: 578 - protein, 214 aa, Artificial Sequence; identical to SEQ ID NO: 386
  Description of Artificial Sequence: Synthetic polypeptide
  XENP33975 Chain 3 - MESO-C[MSLN]_L1.20 Light Chain

SEQ ID NO: 579 - protein, 718 aa, Artificial Sequence
  Description of Artificial Sequence: Synthetic polypeptide
  XENP33976 Chain 1 - MESO-C[MSLN]_H1.12_IgG1_pI(-)_Isosteric _A_PVA_/S267K/L368D/K370S
QVQLVQSGAEVKKPGASVKVSCKASGYTFTSYWMHWVRQAPGQGLEWMGMIHPNSDNTIYYQKFQGRVTMTVDKSISTAYMELSRLRSDDTAVYYCAIIITPVVPKFDYWGQGTLVTVSSASTKGPSVFPLAPSSKSTSGGTAALGCLVKDYFPEPVTVSWNSGALTSGVHTFPAVLQSSGLYSLSSVVTVPSSSLGTQTYICNVNHKPSNTKVDKKVEPKSCGGGGSGGGGSQAVVTQEPSLTVSPGGTVTLTCGSSTGAVTTSNYANWVQQKPGKSPRGLIGGTNKRAPGVPARFSGSLLGGKAALTISGAQPEDEADYYCALWYSNHWVFGGGTKLTVLGKPGSGKPGSGKPGSGKPGSEVQLVESGGGLVQPGGSLRLSCAASGFTFSTYAMNWVRQAPGKGLEWVGRIRSKYNNYATYYADSVKGRFTISRDDSKNTLYLQMNSLRAEDTAVYYCVRHGNFGDEYVSWFAYWGQGTLVTVSSEPKSSDKTHTCPPCPAPPVAGPSVFLFPPKPKDTLMISRTPEVTCVVVDVKHEDPEVKFNWYVDGVEVHNAKTKPREEQYNSTYRVVSVLTVLHQDWLNGKEYKCKVSNKALPAPIEKTISKAKGQPREPQVYTLPPSREQMTKNQVKLTCLVKGFYPSDIAVEWESNGQPENNYKTTPPVLDSDGSFFLYSKLTVDKSRWQQGNVFSCSVMHEALHNHYTQKSLSLSPGK

SEQ ID NO: 580 - protein, 449 aa, Artificial Sequence; identical to SEQ ID NO: 354
  Description of Artificial Sequence: Synthetic polypeptide
  XENP33976 Chain 2 - MESO-C[MSLN]_H1.12_(G4S)2_[CD3]_L1.47_H 1.89_scFv(GKPGS)4_Fc(216)_IgG1_PVA_/S267K/S364K/E357Q

SEQ ID NO: 581 - protein, 214 aa, Artificial Sequence; identical to SEQ ID NO: 386
  Description of Artificial Sequence: Synthetic polypeptide
  XENP33976 Chain 3 - MESO-C[MSLN]_L1.20 Light Chain

SEQ ID NO: 582 - protein, 718 aa, Artificial Sequence; identical to SEQ ID NO: 573
  Description of Artificial Sequence: Synthetic polypeptide
  XENP33977 Chain 1 - MESO-C[MSLN]_H1.3_IgG1_pI(-)_Isosteric_ A_PVA_/S267K/L368D/K370S

SEQ ID NO: 583 - protein, 449 aa, Artificial Sequence; identical to SEQ ID NO: 297
  Description of Artificial Sequence: Synthetic polypeptide
  XENP33977 Chain 2 - MESO-C[MSLN]_H1.3_(G4S)2_[CD3]_L1.47_H1 .89_scFv(GKPGS)4_Fc(216)_IgG1_PVA_/S267K/S364K/E357Q

SEQ ID NO: 584 - protein, 214 aa, Artificial Sequence; identical to SEQ ID NO: 362
  Description of Artificial Sequence: Synthetic polypeptide
  XENP33977 Chain 3 - MESO-C[MSLN]_L1.13 Light Chain

SEQ ID NO: 585 - protein, 718 aa, Artificial Sequence; identical to SEQ ID NO: 573
  Description of Artificial Sequence: Synthetic polypeptide
  XENP33978 Chain 1 - MESO-C[MSLN]_H1.3_IgG1_pI(-)_Isosteric_ A_PVA_/S267K/L368D/K370S

SEQ ID NO: 586 - protein, 449 aa, Artificial Sequence; identical to SEQ ID NO: 297
  Description of Artificial Sequence: Synthetic polypeptide
  XENP33978 Chain 2 - MESO-C[MSLN]_H1.3_(G4S)2_[CD3]_L1.47_H1 .89_scFv(GKPGS)4_Fc(216)_IgG1_PVA_/S267K/S364K/E357Q

SEQ ID NO: 587 - protein, 214 aa, Artificial Sequence; identical to SEQ ID NO: 250
  Description of Artificial Sequence: Synthetic polypeptide
  XENP33978 Chain 3 - MESO-C[MSLN]_L1 Light Chain

SEQ ID NO: 588 - protein, 718 aa, Artificial Sequence; identical to SEQ ID NO: 559
  Description of Artificial Sequence: Synthetic polypeptide
  XENP33979 Chain 1 - MESO-C[MSLN]_H1_IgG1_pI(-)_Isosteric_A_ PVA_/S267K/L368D/K370S

SEQ ID NO: 589 - protein, 449 aa, Artificial Sequence; identical to SEQ ID NO: 288
  Description of Artificial Sequence: Synthetic polypeptide
  XENP33979 Chain 2 - MESO-C[MSLN]_H1_(G4S)2_[CD3]_L1.47_H1.8 9_scFv(GKPGS)4_Fc(216)_IgG1_PVA_/S267K/S364K/E357Q

SEQ ID NO: 590 - protein, 214 aa, Artificial Sequence; identical to SEQ ID NO: 344
  Description of Artificial Sequence: Synthetic polypeptide
  XENP33979 Chain 3 - MESO-C[MSLN]_L1.9 Light Chain

SEQ ID NO: 591 - protein, 718 aa, Artificial Sequence; identical to SEQ ID NO: 579
  Description of Artificial Sequence: Synthetic polypeptide
  XENP33980 Chain 1 - MESO-C[MSLN]_H1.12_IgG1_pI(-)_Isosteric _A_PVA_/S267K/L368D/K370S

SEQ ID NO: 592 - protein, 449 aa, Artificial Sequence; identical to SEQ ID NO: 354
  Description of Artificial Sequence: Synthetic polypeptide
  XENP33980 Chain 2 - MESO-C[MSLN]_H1.12_(G4S)2_[CD3]_L1.47_H 1.89_scFv(GKPGS)4_Fc(216)_IgG1_PVA_/S267K/S364K/E357Q

SEQ ID NO: 593 - protein, 214 aa, Artificial Sequence; identical to SEQ ID NO: 344
  Description of Artificial Sequence: Synthetic polypeptide
  XENP33980 Chain 3 - MESO-C[MSLN]_L1.9 Light Chain

SEQ ID NO: 594 - protein, 449 aa, Artificial Sequence; identical to SEQ ID NO: 297
  Description of Artificial Sequence: Synthetic polypeptide
  XENP34151 Chain 1 - MESO-C[MSLN]_H1.3_IgG1_pI(-)_Isosteric_ A_/PVA_/S267K/L368D/K370S

SEQ ID NO: 595 - protein, 722 aa, Artificial Sequence
  Description of Artificial Sequence: Synthetic polypeptide
  XENP34151 Chain 2 - MESO-C[MSLN]_H1.3_(G4S)2_[CD3]_L1.47_H1 .89_scFv(GKPGS)4_Fc(216)_IgG1_C220S/PVA_/S267K/S364K/E357Q
QVQLVQSGAEVKKPGASVKVSCKASGYTFTSYWMHWVRQAPGQGLEWMGWIHPNSDNTIYYEKFQGRVTMTVDKSISTAYMELSRLRSDDTAVYYCAIIITPVVPKFDYWGQGTLVTVSSASTKGPSVFPLAPSSKSTSGGTAALGCLVKDYFPEPVTVSWNSGALTSGVHTFPAVLQSSGLYSLSSVVTVPSSSLGTQTYICNVNHKPSNTKVDKKVEPKSCGGGGSGGGGSQAVVTQEPSLTVSPGGTVTLTCGSSTGAVTTSNYANWVQQKPGKSPRGLIGGTNKRAPGVPARFSGSLLGGKAALTISGAQPEDEADYYCALWYSNHWVFGGGTKLTVLGKPGSGKPGSGKPGSGKPGSEVQLVESGGGLVQPGGSLRLSCAASGFTFSTYAMNWVRQAPGKGLEWVGRIRSKYNNYATYYADSVKGRFTISRDDSKNTLYLQMNSLRAEDTAVYYCVRHGNFGDEYVSWFAYWGQGTLVTVSSGGGGSGGGGSKTHTCPPCPAPPVAGPSVFLFPPKPKDTLMISRTPEVTCVVVDVKHEDPEVKFNWYVDGVEVHNAKTKPREEQYNSTYRVVSVLTVLHQDWLNGKEYKCKVSNKALPAPIEKTISKAKGQPREPQVYTLPPSREQMTKNQVKLTCLVKGFYPSDIAVEWESNGQPENNYKTTPPVLDSDGSFFLYSKLTVDKSRWQQGNVFSCSVMHEALHNHYTQKSLSLSPGK

SEQ ID NO: 596 - protein, 214 aa, Artificial Sequence; identical to SEQ ID NO: 365
  Description of Artificial Sequence: Synthetic polypeptide
  XENP34151 Chain 3 - MESO-C[MSLN]_L1.14 Light Chain

SEQ ID NO: 597 - protein, 449 aa, Artificial Sequence; identical to SEQ ID NO: 297
  Description of Artificial Sequence: Synthetic polypeptide
  XENP34152 Chain 1 - MESO-C[MSLN]_H1.3_IgG1_pI(-)_Isosteric_ A_/PVA_/S267K/L368D/K370S

SEQ ID NO: 598 - protein, 722 aa, Artificial Sequence; identical to SEQ ID NO: 595
  Description of Artificial Sequence: Synthetic polypeptide
  XENP34152 Chain 2 - MESO-C[MSLN]_H1.3_(G4S)2_[CD3]_L1.47_H1 .89_scFv(GKPGS)4_Fc(216)_IgG1_C220S/PVA_/S267K/S364K/E357Q

SEQ ID NO: 599 - protein, 214 aa, Artificial Sequence; identical to SEQ ID NO: 362
  Description of Artificial Sequence: Synthetic polypeptide
  XENP34152 Chain 3 - MESO-C[MSLN]_L1.13 Light Chain

SEQ ID NO: 600 - protein, 449 aa, Artificial Sequence; identical to SEQ ID NO: 297
  Description of Artificial Sequence: Synthetic polypeptide
  XENP34153 Chain 1 - MESO-C[MSLN]_H1.3_IgG1_pI(-)_Isosteric_ A_/PVA_/S267K/L368D/K370S

SEQ ID NO: 601 - protein, 722 aa, Artificial Sequence; identical to SEQ ID NO: 595
  Description of Artificial Sequence: Synthetic polypeptide
  XENP34153 Chain 2 - MESO-C[MSLN]_H1.3_(G4S)2_[CD3]_L1.47_H1 .89_scFv(GKPGS)4_Fc(216)_IgG1_C220S/PVA_/S267K/S364K/E357Q

SEQ ID NO: 602 - protein, 214 aa, Artificial Sequence; identical to SEQ ID NO: 250
  Description of Artificial Sequence: Synthetic polypeptide
  XENP34153 Chain 3 - MESO-C[MSLN]_L1 Light Chain

SEQ ID NO: 603 - protein, 449 aa, Artificial Sequence; identical to SEQ ID NO: 354
  Description of Artificial Sequence: Synthetic polypeptide
  XENP34154 Chain 1 - MESO-C[MSLN]_H1.12_IgG1_pI(-)_Isosteric _A_/PVA_/S267K/L368D/K370S

SEQ ID NO: 604 - protein, 722 aa, Artificial Sequence
  Description of Artificial Sequence: Synthetic polypeptide
  XENP34154 Chain 2 - MESO-C[MSLN]_H1.12_(G4S)2_[CD3]_L1.47_H 1.89_scFv(GKPGS)4_Fc(216)_IgG1_C220S/PVA_/S267K/S364K/E357Q
QVQLVQSGAEVKKPGASVKVSCKASGYTFTSYWMHWVRQAPGQGLEWMGMIHPNSDNTIYYQKFQGRVTMTVDKSISTAYMELSRLRSDDTAVYYCAIIITPVVPKFDYWGQGTLVTVSSASTKGPSVFPLAPSSKSTSGGTAALGCLVKDYFPEPVTVSWNSGALTSGVHTFPAVLQSSGLYSLSSVVTVPSSSLGTQTYICNVNHKPSNTKVDKKVEPKSCGGGGSGGGGSQAVVTQEPSLTVSPGGTVTLTCGSSTGAVTTSNYANWVQQKPGKSPRGLIGGTNKRAPGVPARFSGSLLGGKAALTISGAQPEDEADYYCALWYSNHWVFGGGTKLTVLGKPGSGKPGSGKPGSGKPGSEVQLVESGGGLVQPGGSLRLSCAASGFTFSTYAMNWVRQAPGKGLEWVGRIRSKYNNYATYYADSVKGRFTISRDDSKNTLYLQMNSLRAEDTAVYYCVRHGNFGDEYVSWFAYWGQGTLVTVSSGGGGSGGGGSKTHTCPPCPAPPVAGPSVFLFPPKPKDTLMISRTPEVTCVVVDVKHEDPEVKFNWYVDGVEVHNAKTKPREEQYNSTYRVVSVLTVLHQDWLNGKEYKCKVSNKALPAPIEKTISKAKGQPREPQVYTLPPSREQMTKNQVKLTCLVKGFYPSDIAVEWESNGQPENNYKTTPPVLDSDGSFFLYSKLTVDKSRWQQGNVFSCSVMHEALHNHYTQKSLSLSPGK

SEQ ID NO: 605 - protein, 214 aa, Artificial Sequence; identical to SEQ ID NO: 344
  Description of Artificial Sequence: Synthetic polypeptide
  XENP34154 Chain 3 - MESO-C[MSLN]_L1.9 Light Chain

SEQ ID NO: 606 - protein, 449 aa, Artificial Sequence; identical to SEQ ID NO: 534
  Description of Artificial Sequence: Synthetic polypeptide
  XENP34159 Chain 1 - MESO-C[MSLN]_H1.3_IgG1_pI(-)_Isosteric_ A_/PVA_/S267K/L368D/K370S/M248L/N434S

SEQ ID NO: 607 - protein, 722 aa, Artificial Sequence
  Description of Artificial Sequence: Synthetic polypeptide
  XENP34159 Chain 2 - MESO-C[MSLN]_H1.3_(G4S)2_[CD3]_L1.47_H1 .89_scFv(GKPGS)4_Fc(216)_IgG1_C220S/PVA_/S267K/S364K/E357Q/ M248L/N434S
QVQLVQSGAEVKKPGASVKVSCKASGYTFTSYWMHWVRQAPGQGLEWMGWIHPNSDNTIYYEKFQGRVTMTVDKSISTAYMELSRLRSDDTAVYYCAIIITPVVPKFDYWGQGTLVTVSSASTKGPSVFPLAPSSKSTSGGTAALGCLVKDYFPEPVTVSWNSGALTSGVHTFPAVLQSSGLYSLSSVVTVPSSSLGTQTYICNVNHKPSNTKVDKKVEPKSCGGGGSGGGGSQAVVTQEPSLTVSPGGTVTLTCGSSTGAVTTSNYANWVQQKPGKSPRGLIGGTNKRAPGVPARFSGSLLGGKAALTISGAQPEDEADYYCALWYSNHWVFGGGTKLTVLGKPGSGKPGSGKPGSGKPGSEVQLVESGGGLVQPGGSLRLSCAASGFTFSTYAMNWVRQAPGKGLEWVGRIRSKYNNYATYYADSVKGRFTISRDDSKNTLYLQMNSLRAEDTAVYYCVRHGNFGDEYVSWFAYWGQGTLVTVSSGGGGSGGGGSKTHTCPPCPAPPVAGPSVFLFPPKPKDTLMISRTPEVTCVVVDVKHEDPEVKFNWYVDGVEVHNAKTKPREEQYNSTYRVVSVLTVLHQDWLNGKEYKCKVSNKALPAPIEKTISKAKGQPREPQVYTLPPSREQMTKNQVKLTCLVKGFYPSDIAVEWESNGQPENNYKTTPPVLDSDGSFFLYSKLTVDKSRWQQGNVFSCSVLHEALHSHYTQKSLSLSPGK

SEQ ID NO: 608 - protein, 214 aa, Artificial Sequence; identical to SEQ ID NO: 365
  Description of Artificial Sequence: Synthetic polypeptide
  XENP34159 Chain 3 - MESO-C[MSLN]_L1.14 Light Chain

SEQ ID NO: 609 - protein, 449 aa, Artificial Sequence; identical to SEQ ID NO: 534
  Description of Artificial Sequence: Synthetic polypeptide
  XENP34160 Chain 1 - MESO-C[MSLN]_H1.3_IgG1_pI(-)_Isosteric_ A_/PVA_/S267K/L368D/K370S/M248L/N434S

SEQ ID NO: 610 - protein, 722 aa, Artificial Sequence; identical to SEQ ID NO: 607
  Description of Artificial Sequence: Synthetic polypeptide
  XENP34160 Chain 2 - MESO-C[MSLN]_H1.3_(G4S)2_[CD3]_L1.47_H1 .89_scFv(GKPGS)4_Fc(216)_IgG1_C220S/PVA_/S267K/S364K/E357Q/ M248L/N434S

SEQ ID NO: 611 - protein, 214 aa, Artificial Sequence; identical to SEQ ID NO: 362
  Description of Artificial Sequence: Synthetic polypeptide
  XENP34160 Chain 3 - MESO-C[MSLN]_L1.13 Light Chain

SEQ ID NO: 612 - protein, 449 aa, Artificial Sequence; identical to SEQ ID NO: 534
  Description of Artificial Sequence: Synthetic polypeptide
  XENP34161 Chain 1 - MESO-C[MSLN]_H1.3_IgG1_pI(-)_Isosteric_ A_/PVA_/S267K/L368D/K370S/M248L/N434S

SEQ ID NO: 613 - protein, 722 aa, Artificial Sequence; identical to SEQ ID NO: 607
  Description of Artificial Sequence: Synthetic polypeptide
  XENP34161 Chain 2 - MESO-C[MSLN]_H1.3_(G4S)2_[CD3]_L1.47_H1 .89_scFv(GKPGS)4_Fc(216)_IgG1_C220S/PVA_/S267K/S364K/E357Q/ M248L/N434S

SEQ ID NO: 614 - protein, 214 aa, Artificial Sequence; identical to SEQ ID NO: 250
  Description of Artificial Sequence: Synthetic polypeptide
  XENP34161 Chain 3 - MESO-C[MSLN]_L1 Light Chain

SEQ ID NO: 615 - protein, 449 aa, Artificial Sequence; identical to SEQ ID NO: 543
  Description of Artificial Sequence: Synthetic polypeptide
  XENP34162 Chain 1 - MESO-C[MSLN]_H1.12_IgG1_pI(-)_Isosteric _A_/PVA_/S267K/L368D/K370S/M248L/N434S

SEQ ID NO: 616 - protein, 722 aa, Artificial Sequence
  Description of Artificial Sequence: Synthetic polypeptide
  XENP34162 Chain 2 - MESO-C[MSLN]_H1.12_(G4S)2_[CD3]_L1.47_H 1.89_scFv(GKPGS)4_Fc(216)_IgG1_C220S/PVA_/S267K/S364K/E357Q /M248L/N434S
QVQLVQSGAEVKKPGASVKVSCKASGYTFTSYWMHWVRQAPGQGLEWMGMIHPNSDNTIYYQKFQGRVTMTVDKSISTAYMELSRLRSDDTAVYYCAIIITPVVPKFDYWGQGTLVTVSSASTKGPSVFPLAPSSKSTSGGTAALGCLVKDYFPEPVTVSWNSGALTSGVHTFPAVLQSSGLYSLSSVVTVPSSSLGTQTYICNVNHKPSNTKVDKKVEPKSCGGGGSGGGGSQAVVTQEPSLTVSPGGTVTLTCGSSTGAVTTSNYANWVQQKPGKSPRGLIGGTNKRAPGVPARFSGSLLGGKAALTISGAQPEDEADYYCALWYSNHWVFGGGTKLTVLGKPGSGKPGSGKPGSGKPGSEVQLVESGGGLVQPGGSLRLSCAASGFTFSTYAMNWVRQAPGKGLEWVGRIRSKYNNYATYYADSVKGRFTISRDDSKNTLYLQMNSLRAEDTAVYYCVRHGNFGDEYVSWFAYWGQGTLVTVSSGGGGSGGGGSKTHTCPPCPAPPVAGPSVFLFPPKPKDTLMISRTPEVTCVVVDVKHEDPEVKFNWYVDGVEVHNAKTKPREEQYNSTYRVVSVLTVLHQDWLNGKEYKCKVSNKALPAPIEKTISKAKGQPREPQVYTLPPSREQMTKNQVKLTCLVKGFYPSDIAVEWESNGQPENNYKTTPPVLDSDGSFFLYSKLTVDKSRWQQGNVFSCSVLHEALHSHYTQKSLSLSPGK

SEQ ID NO: 617 - protein, 214 aa, Artificial Sequence; identical to SEQ ID NO: 344
  Description of Artificial Sequence: Synthetic polypeptide
  XENP34162 Chain 3 - MESO-C[MSLN]_L1.9 Light Chain

SEQ ID NO: 618 - protein, 5 aa, Artificial Sequence
  Description of Artificial Sequence: Synthetic peptide
  See specification as filed for detailed description of substitutions and preferred embodiments
GGGGS

1. A heterodimeric antibody comprising:
a) a first monomer comprising, from N-terminus to C-terminus, a VH1-CH1-linker 1-scFv-linker 2-CH2-CH3,
wherein VH1 is a first variable heavy domain, scFv is an anti-CD3 scFV, linker 1 and linker 2 are a first domain linker and second domain linker, respectively, and CH2-CH3 is a first Fc domain;
b) a second monomer comprising, from N-terminus to C-terminus, a VH2-CH1-hinge-CH2-CH3, wherein VH2 is a second variable heavy domain and CH2-CH3 is a second Fc domain; and
c) a common light chain comprising a variable light domain and a light chain constant domain;
wherein the first variable heavy domain and the variable light domain form a first PSMA binding domain, and the second variable heavy domain and the variable light domain form a second PSMA binding domain.

2. A heterodimeric antibody according to claim 1, wherein the first and second PSMA binding domains each comprise the variable heavy complementary determining regions 1-3 (vhCDR1-3) of PSMA-H variable heavy domain H1 (FIG. 17); and the variable light complementary determining regions (vlCDR1-3) of a PSMA-H variable light domain selected from any one of the PSMA-H variable light domains L1 and L1.1-L1.84 (FIGS. 17 and 18A-18E).

3. (canceled)

4. A heterodimeric antibody according to claim 1, wherein the scFv comprises the vhCDR1-3 and the vlCDR1-3 of any of the following CD3 binding domains: H1.32_L1.47, H1.30_L1.47, H1.89_L1.47, H1.90_L1.47, H1.33_L1.47, H1.31_L1.47, L1.47_H1.30, L1.47_H1.30, L1.47_H1.32, L1.47_H1.89, L1.47_H1.90, L1.47_H1.33, and L1.47_H1.31 (FIGS. 10A-10F).

5.-22. (canceled)

23. A heterodimeric antibody according to claim 1, selected from the following heterodimeric antibodies: XENP31602, XENP31603, XENP31855, XENP32218, XENP32219, XENP32220, XENP32221, XENP32222, XENP32223, XENP32224, XENP32225, XENP32226, XENP34237, XENP34238, XENP34239, XENP34625, XENP34626, XENP34627, XENP34628, XENP31853, XENP31856, XENP33063, XENP33064, XENP33065, XENP33066, XENP33067, XENP33068, XENP33069, XENP33070, XENP33071, XENP34240, XENP34241, XENP34242, XENP34629, XENP34630, XENP34631, XENP34632, XENP31854, and XENP31857.

24. A nucleic acid composition comprising:
a) a first nucleic acid encoding the first monomer according to claim 1;
b) a second nucleic acid encoding the second monomer according to claim 1; and
c) a third nucleic acid encoding the light chain according to claim 1.

25. An expression vector composition comprising:
a) a first expression vector comprising the first nucleic acid according to claim 1;
b) a second expression vector comprising the second nucleic acid according to claim 24; and
c) a third expression vector comprising the third nucleic acid according to claim 1.

26. A host cell transformed with the expression vector composition according to claim 1.

27. (canceled)

28. A heterodimeric antibody comprising:
a) a first monomer comprising:
i) an anti-CD3 scFv comprising a first variable heavy domain, an scFv linker and a first variable light domain; and
ii) a first Fc domain, wherein the scFv is covalently attached to the N-terminus of the first Fc domain using a domain linker;
b) a second monomer comprising a VH2-CH1-hinge-CH2-CH3 monomer, wherein VH is a second variable heavy domain and CH2-CH3 is a second Fc domain; and
c) a light chain comprising a second variable light domain,
wherein the second variable heavy domain and the second variable light domain form an PSMA binding domain.

29.-53. (canceled)

54. A composition comprising a Prostate Specific Membrane Antigen (PSMA) binding domain comprising:
a) a variable heavy domain comprising the variable heavy complementary determining regions 1-3 (vhCDR1-3) of PSMA-H variable heavy domain H1 (FIG. 17); and
b) a variable light domain comprising the variable light complementary determining regions (vlCDR1-3) of a PSMA-H variable light domain selected from PSMA-H variable light domains L1 and L1.1-L1.84 (FIGS. 17 and 18A-18E).

55.-82. (canceled)
